(19) United States
(12) Patent Application Publication
(10) Pub. No.: US 2026/0217777 A1
(43) Pub. Date: Jul. 30, 2026

(54) ENGINEERED RNASE INHIBITOR VARIANTS

(71) Applicant: Codexis, Inc., Redwood City, CA (US)

(72) Inventors: Anders Matthew Knight, Mountain View, CA (US); Simon Ng, San Francisco, CA (US)

(21) Appl. No.: 19/142,170

(22) PCT Filed: Dec. 21, 2023
(86) PCT No.: PCT/US2023/085570

§ 371 Date: Jun. 20, 2025

Related U.S. Application Data
(60) Provisional application No. 63/476,599, filed on Dec. 21, 2022.

(51) Int. Cl. C07K 14/47; C12Q 1/6806

(52) U.S. Cl. CPC C07K 14/4703; C12Q 1/6806

(57) ABSTRACT

The present disclosure relates to engineered RNase inhibitor polypeptides and compositions thereof, as well as polynucleotides encoding the engineered RNase inhibitor polypeptides. The present disclosure also provides methods of using the engineered RNase inhibitor polypeptides or compositions thereof for molecular biological, diagnostic and other purposes.

### CROSS-REFERENCE TO RELATED APPLICATIONS

[0001] This application claims the benefit of U.S. Provisional Application No. 63/476,599, filed Dec. 21, 2022, which is incorporated by reference herein.

### REFERENCE TO SEQUENCE LISTING, TABLE OR COMPUTER PROGRAM

[0002] The Sequence Listing concurrently submitted herewith as file name CX9-239WO2_ST26.xml, created on Dec. 21, 2023, with a file size of 1,805,219 bytes, is part of the specification and is incorporated by reference herein.

### TECHNICAL FIELD

[0003] The present disclosure provides engineered RNase inhibitor polypeptides and compositions thereof, as well as polynucleotides encoding the engineered RNase inhibitor polypeptides. The disclosure also provides methods of using the recombinant RNase inhibitor or compositions thereof, including for RNA isolation, in vitro transcription, cDNA synthesis, RT-PCR, and other molecular biological and diagnostic purposes.

### BACKGROUND

[0004] RNase inhibitors (RI) are expressed in a variety of vertebrate cells and inhibit activity of ribonucleases (RNase) (see, e.g., Lee et al., Biochemistry, 1989, 28 (1): 225-230; Lomax et al. J Mol Biol., 2014, 426 (17): 3041-3056). RNase inhibitors may have biological roles in regulating biological activity of ribonucleases, such as in response to cellular stress, blood vessel growth, neuronal survival, and toxic response to pathogens (see, e.g., Ohashi et al., PLOS One, 2017, 12 (3): e0174237). Inhibition of RNases by RIs is attributed to the non-covalent, high affinity binding of the RI to RNases. The measured K_{d} for RI: RNase complex is in the range of 10⁻¹⁴ M to 10⁻¹⁶ M (see, e.g., Dickson et a., Prog Nucleic Acid Res Mol Biol., 2005, 80:349-374).

[0005] RNase inhibitors have practical applications in molecular and diagnostic techniques involving manipulation of RNA, such as in vitro transcription reactions, cDNA synthesis using reverse transcriptases, RT-PCR reactions, RNA purification/isolation, particularly where RNA integrity is critical and RNase contamination is a concern.

[0006] Because RNase are ubiquitous and generally stable to heat and detergents, it may contaminate reagents and laboratory instruments, such as pipets, flasks, and robotic liquid handlers. RNase may also be present in samples used as sources of the RNA, such as cellular extracts, tissues samples, and other biological samples. The presence of RNase can cause degradation of RNA compromising its integrity.

[0007] RNase inhibitors have been isolated from various sources, many of them being commercially available (see, e.g., Burton et al., Int J Pept Protein Res., 1982, 19 (4): 372-9). A prototypical RNase inhibitor is human placental RNase inhibitor, which is expressed as a single-chain polypeptide of 460 amino acid residues and contains leucine-rich repeats, a motif typically associated with protein: protein interactions. RNasin® is a recombinant form of placental RNase inhibitor produced in E. coli. RNase inhibitors from mouse and pig are also commercially available. RNase inhibitors generally do not inhibit other nucleases, reverse transcriptases or polymerases, making it a useful reagent in protecting RNA from degradation in methods employing such enzymes, such as in vitro transcription and RT-PCR. However, RNase inhibitors have some drawbacks, including low temperature stability, pH sensitivity, and sensitivity to oxidation (see, e.g., Kim et al., Protein Sci., 1999, 8 (2): 430-434). In applications involving high temperatures, such as RT-PCR, thermal inactivation of RNase inhibitors can result in release of a bound RNase, which can renature to its active form and degrade the RNA template in the sample.

### SUMMARY

[0008] The present disclosure provides engineered RNase inhibitor polypeptides and compositions thereof, as well as polynucleotides encoding the engineered RNase inhibitor polypeptides. The present disclosure also provides methods of using the engineered RNase inhibitor polypeptides and compositions thereof for nucleic acid synthesis, diagnostic assays, and other purposes.

[0009] In one aspect, the present disclosure provides an engineered RNase inhibitor, or a functional fragment thereof, comprising an amino acid sequence having at least 70%, 75%, 80%, 81%, 82%, 83%, 84%, 85%, 86%, 87%, 88%, 89%, 90%, 91%, 92%, 93%, 94%, 95%, 96%, 97%, 98%, 99%, or more sequence identity to a reference sequence corresponding to residues 13 to 468 of an even numbered SEQ ID NO. of SEQ ID NOs: 2 and 26-824, or to a reference sequence corresponding to an even numbered SEQ ID NO. of SEQ ID NOs: 2 and 26-824, wherein the amino acid sequence comprises one or more substitutions relative to the reference sequence corresponding to residues 13 to 468 of SEQ ID NO: 2, 36, 238, 320, 360, 442, or 578, or relative to the reference sequence corresponding to SEQ ID NO: 2, 36, 238, 320, 360, 442, or 578.

[0010] In some embodiments, the engineered RNase inhibitor comprises an amino acid sequence having at least 70%, 75%, 80%, 81%, 82%, 83%, 84%, 85%, 86%, 87%, 88%, 89%, 90%, 91%, 92%, 93%, 94%, 95%, 96%, 97%, 98%, 99%, or more sequence identity to a reference sequence corresponding to residues 13 to 468 of SEQ ID NO: 2, 36, 238, 320, 360, 442, or 578, or to a reference sequence corresponding to SEQ ID NO: 2, 36, 238, 320, 360, 442, or 578, wherein the amino acid sequence comprises one or more substitutions relative to the reference sequence corresponding to residues 13 to 468 of SEQ ID NO: 2, 36, 238, 320, 360, 442, or 578, or relative to the reference sequence corresponding to SEQ ID NO: 2, 36, 238, 320, 360, 442, or 578.

[0011] In some embodiments, the engineered RNase inhibitor comprises an amino acid sequence having at least 70%, 75%, 80%, 81%, 82%, 83%, 84%, 85%, 86%, 87%, 88%, 89%, 90%, 91%, 92%, 93%, 94%, 95%, 96%, 97%, 98%, 99%, or more sequence identity to the reference sequence corresponding to residues 13 to 468 of SEQ ID NO: 2, or to the reference sequence corresponding to SEQ ID NO: 2, wherein the amino acid sequence comprises one or more substitutions relative to the reference sequence corresponding to residues 13 to 468 of SEQ ID NO: 2, or relative to the reference sequence corresponding to SEQ ID NO: 2.

[0012] In some embodiments, the engineered RNase inhibitor comprises an amino acid sequence having at least 70%, 75%, 80%, 81%, 82%, 83%, 84%, 85%, 86%, 87%, 88%, 89%, 90%, 91%, 92%, 93%, 94%, 95%, 96%, 97%, 98%, 99%, or more sequence identity to the reference sequence corresponding to residues 13 to 468 of SEQ ID NO: 36, 238, 320, 360, 442, or 578, or to the reference sequence corresponding to SEQ ID NO: 36, 238, 320, 360, 442, or 578, wherein the amino acid sequence comprises one or more substitutions relative to the reference sequence corresponding to residues 13 to 468 of SEQ ID NO: 2, or relative to the reference sequence corresponding to SEQ ID NO: 2.

[0013] In some embodiments, the engineered RNase inhibitor comprises an amino acid sequence having at least 70%, 75%, 80%, 81%, 82%, 83%, 84%, 85%, 86%, 87%, 88%, 89%, 90%, 91%, 92%, 93%, 94%, 95%, 96%, 97%, 98%, 99% or more sequence identity to a reference sequence corresponding to residues 13 to 468 of an even numbered SEQ ID NO. of SEQ ID NOs: 26-824, or to a reference sequence corresponding to an even numbered SEQ ID NO. of SEQ ID NOs: 26-824, wherein the amino acid sequence comprises one or more substitutions relative to the reference sequence corresponding to residues 13 to 468 of SEQ ID NO: 2, or relative to the reference sequence corresponding to SEQ ID NO: 2.

[0014] In some embodiments, the engineered RNase inhibitor comprises an amino acid sequence having at least 70%, 75%, 80%, 81%, 82%, 83%, 84%, 85%, 86%, 87%, 88%, 89%, 90%, 91%, 92%, 93%, 94%, 95%, 96%, 97%, 98%, 99% or more sequence identity to a reference sequence corresponding to residues 13 to 468 of an even numbered SEQ ID NO. of SEQ ID NOs: 26-142, or to a reference sequence corresponding to an even numbered SEQ ID NO. of SEQ ID NOs: 26-142, wherein the amino acid sequence comprises one or more substitutions relative to the reference sequence corresponding to residues 13 to 468 of SEQ ID NO: 2, or relative to the reference sequence corresponding to SEQ ID NO: 2.

[0015] In some embodiments, the amino acid sequence of the engineered RNase inhibitor comprises at least a substitution at amino acid position 12, 13, 15, 28, 35, 37, 38, 40, 50, 51, 56, 57, 60, 64, 66, 78, 81, 83, 84, 90, 91, 94, 95, 107, 113, 118, 121, 124, 126, 135, 137, 138, 142, 145, 147, 148, 150, 156, 158, 167, 168, 173, 175, 176, 177, 178, 203, 205, 221, 228, 230, 237, 243, 257, 260, 265, 267, 272, 285, 291, 296, 317, 319, 323, 326, 332, 338, 341, 342, 345, 348, 351, 363, 367, 373, 377, 385, 386, 390, 395, 396, 400, 417, 419, 422, 429, 430, 452, 453, 459, or 466, or combinations thereof, wherein the amino acid positions are relative to the reference sequence corresponding to residues 13 to 468 of SEQ ID NO: 2, or relative to the reference sequence corresponding to SEQ ID NO: 2.

[0016] In some embodiments, the amino acid sequence of the engineered RNase inhibitor comprises at least a substitution at amino acid position 50, 64, 81, 90, 95, 107, 113, 124, 142, 145, 147, 148, 176, 203, 205, 228, 243, 257, 272, 285, 291, 296, 319, 323, 342, 348, 390, 395, 452, 453, or 459, or combinations thereof, wherein the amino acid positions are relative to the reference sequence corresponding to residues 13 to 468 of SEQ ID NO: 2, or relative to the reference sequence corresponding to SEQ ID NO: 2.

[0017] In some embodiments, the amino acid sequence of the engineered RNase inhibitor comprises at least a substitution at amino acid position 95, 296, or 459, or combinations thereof, wherein the amino acid positions are relative to the reference sequence corresponding to residues 13 to 468 of SEQ ID NO: 2, or relative to the reference sequence corresponding to SEQ ID NO: 2.

[0018] In some embodiments, the amino acid sequence of the engineered RNase inhibitor comprises at least a substitution or substitution set at amino acid position(s) 257/459, 345, 257, 296, 113, 95/296/459, 95/257/296, 453, 107/267, 417/422/459, 395, 390, 257/296, 243, 156/257, 351, 348, 363, 95/257/296/422, 94/121/332/390/466, 257/417/419/459, 452, 377/390, 272, 126/386, 267, 430, 230/429, 459, 83/107/230/267/429, 107/429, 107/323/429, 94/121/265/390, 400, 429, or 81, wherein the amino acid positions are relative to the reference sequence corresponding to residues 13 to 468 of SEQ ID NO: 2, or relative to the reference sequence corresponding to SEQ ID NO: 2.

[0019] In some embodiments, the amino acid sequence of the engineered RNase inhibitor comprises at least a substitution or substitution set of a variant provided in Tables 8.1, 9.1, 9.2, 10.1, 11.1, 12.1, 12.2, 13.1, 13.2, 14.1, 14.2, and the Appendix, wherein the amino acid positions are relative to the reference sequence corresponding to residues 13 to 468 of SEQ ID NO: 2, or relative to the reference sequence corresponding to SEQ ID NO: 2.

[0020] In some embodiments, the amino acid sequence of the engineered RNase inhibitor comprises at least a substitution or substitution set of an RNase inhibitor variant provided in Tables 8.1, 9.1, 9.2, 10.1, 11.1, 12.1, 12.2, 13.1, 13.2, 14.1, 14.2, and the Appendix, wherein the amino acid positions are relative to the reference sequence corresponding to residues 13 to 468 of SEQ ID NO: 2, or relative to the reference sequence corresponding to SEQ ID NO: 2.

[0021] In some embodiments, the engineered RNase inhibitor comprises an amino acid sequence having at least 70%, 75%, 80%, 81%, 82%, 83%, 84%, 85%, 86%, 87%, 88%, 89%, 90%, 91%, 92%, 93%, 94%, 95%, 96%, 97%, 98%, 99%, or more sequence identity to the reference sequence corresponding to residues 13 to 468 of SEQ ID NO: 36, 238, 320, 360, 442, or 578, or to the reference sequence corresponding to SEQ ID NO: 36, 238, 320, 360, 442, or 578.

[0022] In some embodiments, the engineered RNase inhibitor comprises an amino acid sequence having at least 70%, 75%, 80%, 81%, 82%, 83%, 84%, 85%, 86%, 87%, 88%, 89%, 90%, 91%, 92%, 93%, 94%, 95%, 96%, 97%, 98%, 99% or more sequence identity to a reference sequence corresponding to residues 13 to 468 of an even numbered SEQ ID NO. of SEQ ID NOs: 26-824, or to a reference sequence corresponding to an even numbered SEQ ID NO. of SEQ ID NOs: 26-824.

[0023] In some embodiments, the engineered RNase inhibitor comprises an amino acid sequence having at least 70%, 75%, 80%, 81%, 82%, 83%, 84%, 85%, 86%, 87%, 88%, 89%, 90%, 91%, 92%, 93%, 94%, 95%, 96%, 97%, 98%, 99%, or more sequence identity to the reference sequence corresponding to residues 13 to 468 of SEQ ID NO: 36, 238, 320, 360, 442, or 578, or to the reference sequence corresponding to SEQ ID NO: 36, 238, 320, 360, 442, or 578, wherein the amino acid sequence comprises one or more substitutions relative to the reference sequence corresponding to residues 13 to 468 of SEQ ID NO: 36, 238, 320, 360, 442, or 578, or relative to the reference sequence corresponding to SEQ ID NO: 36, 238, 320, 360, 442, or 578.

[0024] In some embodiments, the engineered RNase inhibitor comprises an amino acid sequence having at least 70%, 75%, 80%, 81%, 82%, 83%, 84%, 85%, 86%, 87%, 88%, 89%, 90%, 91%, 92%, 93%, 94%, 95%, 96%, 97%, 98%, 99% or more sequence identity to a reference sequence corresponding to residues 13 to 468 of an even numbered SEQ ID NO. of SEQ ID NOs: 26-824, or to a reference sequence corresponding to an even numbered SEQ ID NO. of SEQ ID NOs: 26-824, wherein the amino acid sequence comprises one or more substitutions relative to the reference sequence corresponding to residues 13 to 468 of SEQ ID NO: 36, 238, 320, 360, 442, or 578, or relative to the reference sequence corresponding to SEQ ID NO: 36, 238, 320, 360, 442, or 578.

[0025] In some embodiments, the amino acid sequence of the engineered RNase inhibitor comprises at least a substitution at amino acid position 12, 13, 15, 28, 35, 37, 38, 40, 50, 51, 56, 57, 60, 64, 66, 78, 81, 83, 84, 90, 91, 94, 95, 107, 113, 118, 121, 124, 126, 135, 137, 138, 142, 145, 147, 148, 150, 156, 158, 167, 168, 173, 175, 176, 177, 178, 203, 205, 221, 228, 230, 237, 243, 257, 260, 265, 267, 272, 285, 291, 296, 317, 319, 323, 326, 332, 338, 341, 342, 345, 348, 351, 363, 367, 373, 377, 385, 386, 390, 395, 396, 400, 417, 419, 422, 429, 430, 452, 453, 459, or 466, or combinations thereof, wherein the amino acid positions are relative to the reference sequence corresponding to residues 13 to 468 of SEQ ID NO: 36, 238, 320, 360, 442, or 578, or relative to the reference sequence corresponding to SEQ ID NO: 36, 238, 320, 360, 442, or 578.

[0026] In some embodiments, the amino acid sequence of the engineered RNase inhibitor comprises at least a substitution or an amino acid residue 12K, 13T, 15R, 28A/H, 35R, 37A/C, 38A/C/R/T, 40I, 50Q/S/M, 51H, 56A, 57M/T/V, 60K/S, 64R/V, 661, 78K/T, 81F/M/T/V, 83L, 84I/V, 90G, 91K, 94L, 95E/Q, 107A/D/I/V, 113G, 118R, 121S, 124A, 126V, 135V, 137V, 138L, 142H/Q, 145E/G/I/M/S/V, 147E/P, 148Q/N, 150Q, 156M, 158C, 167K, 168F/I, 173I, 175F, 176S, 177T/V, 178D, 203E, 2051/L/P/V, 221S, 228A/L/K/R/Q, 230L, 237R, 243C/M/R/S, 257F/G/S/T/V, 260L/S/Y, 265L, 267H/K/R/T, 272N/Q, 285K/Q, 291E/P/S, 296I/L, 317S, 319G/T, 323E, 326L, 332L, 338V, 341C, 342A/H/M, 345A/S, 348T/K, 351K/R, 363E/M, 367A/L/V, 373A, 377S/T, 385A, 386G, 390G/S/T, 395C/E/I/L/M/V, 396A, 400L, 417L, 419D, 422V, 429L, 430G/L, 452K/R, 453A/F/K/L/M/R/W, 459E/K/M, or 466I, or combinations thereof, wherein the amino acid positions are relative to the reference sequence corresponding to residues 13 to 468 of SEQ ID NO: 36, 238, 320, 360, 442, or 578, or relative to the reference sequence corresponding to SEQ ID NO: 36, 238, 320, 360, 442, or 578.

[0027] In some embodiments, the amino acid sequence of the engineered RNase inhibitor comprises at least a substitution at amino acid position 50, 64, 81, 90, 95, 107, 113, 124, 142, 145, 147, 148, 176, 203, 205, 228, 243, 257, 272, 285, 291, 296, 319, 323, 342, 348, 390, 395, 452, 453, or 459, or combinations thereof, wherein the amino acid positions are relative to the reference sequence corresponding to residues 13 to 468 of SEQ ID NO: 36, 238, 320, 360, 442, or 578, or relative to the reference sequence corresponding to SEQ ID NO: 36, 238, 320, 360, 442, or 578.

[0028] In some embodiments, the engineered RNase inhibitor comprises an amino acid sequence having at least 70%, 75%, 80%, 81%, 82%, 83%, 84%, 85%, 86%, 87%, 88%, 89%, 90%, 91%, 92%, 93%, 94%, 95%, 96%, 97%, 98%, 99%, or more sequence identity to the reference sequence corresponding to residues 13 to 468 of SEQ ID NO: 36, or to the reference sequence corresponding to SEQ ID NO: 36, wherein the amino acid sequence comprises one or more substitutions relative to the reference sequence corresponding to residues 13 to 468 of SEQ ID NO: 36, or relative to the reference sequence corresponding to SEQ ID NO: 36.

[0029] In some embodiments, the engineered RNase inhibitor comprises an amino acid sequence having at least 70%, 75%, 80%, 81%, 82%, 83%, 84%, 85%, 86%, 87%, 88%, 89%, 90%, 91%, 92%, 93%, 94%, 95%, 96%, 97%, 98%, 99%, or more sequence identity to the reference sequence corresponding to residues 13 to 468 of an even-numbered SEQ ID NO. of SEQ ID NOs: 144-316, or to the reference sequence corresponding to an even-numbered SEQ ID NO. of SEQ ID NOs: 144-316, wherein the amino acid sequence comprises one or more substitutions relative to the reference sequence corresponding to residues 13 to 468 of SEQ ID NO: 36, or relative to the reference sequence corresponding to SEQ ID NO: 36.

[0030] In some embodiments, the amino acid sequence of the engineered RNase inhibitor comprises at least a substitution or substitution set at amino acid position(s) 323/390/429, 257/323/429, 257/390, 257/323/390, 257/323/390/429, 257/429, 257/377/390, 135/257/323/377/390, 323/377/390/429, 257/323/377/390, 257/377/429, 158/257/323/377/390, 257/323/377/429, 167/257/323/390/429, 377/390/429, 377/390, 257/323/377/390/429, 257/377, 390/429, 257/377/390/429, 257/390/429, 390, 243/363/390, 113/257/351/363/429, 113/257/351/390/430, 113/257/272/390, 113/243/351/390/429, 257/272/345/348, 243/257/351/390, 113/243/257/272/390, 257/272/363/390/430, 257/351/390, 113/243/390/430, 113/257/267/351/363/400/430, 113/243/257/351/430, 243/267/341/390/395, 113/243/257/345/348, 113/243/257/348/390, 243/345/348/390, 113/243/257/345/430, 257/345/348/351/390/429/430, 272/345/390/429/430, 243/267/351, 243/272/345/390, 113/257/363/390, 243/390/429, 113/243/257/351/390, 113/243/272/345/348/430, 243/267/272/348/390, 113/257/272/345/348/363/430, 113/243/390/429/430, 113/243/257/272/351/363, 243/272/345/348/363/390/395, 113/243/272/351/363/390/395, 113/243/257/272/345/390/430, 113/243/267/272/363/390/430, 113/243/267/348/363/430, 113/243/257/351/390/430, 113/243/257/272/351/390, 113/243/267/390/430, 243/257/348/395/430, 243/345/348/429/430, 243/257/345/348/395, 243/257/272/351/400/429, 113/243/267, 113/390/430, 243/267/351/400, or 429/430, wherein the amino acid positions are relative to the reference sequence corresponding to residues 13 to 468 of SEQ ID NO: 36, or relative to the reference sequence corresponding to SEQ ID NO: 36.

[0031] In some embodiments, the engineered RNase inhibitor comprises an amino acid sequence having at least 70%, 75%, 80%, 81%, 82%, 83%, 84%, 85%, 86%, 87%, 88%, 89%, 90%, 91%, 92%, 93%, 94%, 95%, 96%, 97%, 98%, 99%, or more sequence identity to the reference sequence corresponding to residues 13 to 468 of SEQ ID NO: 238, or to the reference sequence corresponding to SEQ ID NO: 238, wherein the amino acid sequence comprises one or more substitutions relative to the reference sequence corresponding to residues 13 to 468 of SEQ ID NO: 238, or relative to the reference sequence corresponding to SEQ ID NO: 238.

[0032] In some embodiments, the engineered RNase inhibitor comprises an amino acid sequence having at least 70%, 75%, 80%, 81%, 82%, 83%, 84%, 85%, 86%, 87%, 88%, 89%, 90%, 91%, 92%, 93%, 94%, 95%, 96%, 97%, 98%, 99%, or more sequence identity to the reference sequence corresponding to residues 13 to 468 of an even-numbered SEQ ID NO. of SEQ ID NOs: 318-352, or to the reference sequence corresponding to an even-numbered SEQ ID NO. of SEQ ID NOs: 318-352, wherein the amino acid sequence comprises one or more substitutions relative to the reference sequence corresponding to residues 13 to 468 of SEQ ID NO: 238, or relative to the reference sequence corresponding to SEQ ID NO: 238.

[0033] In some embodiments, the amino acid sequence of the engineered RNase inhibitor comprises at least a substitution or substitution set at amino acid position(s) 323/453, 323/348/452, 452/453, 323/351/430/452/453, 291, 145, 228, 323/429, 38, 150, 12, 173, 38/237, or 40, wherein the amino acid positions are relative to the reference sequence corresponding to residues 13 to 468 of SEQ ID NO: 238, or relative to the reference sequence corresponding to SEQ ID NO: 238.

[0034] In some embodiments, the engineered RNase inhibitor comprises an amino acid sequence having at least 70%, 75%, 80%, 81%, 82%, 83%, 84%, 85%, 86%, 87%, 88%, 89%, 90%, 91%, 92%, 93%, 94%, 95%, 96%, 97%, 98%, 99%, or more sequence identity to the reference sequence corresponding to residues 13 to 468 of SEQ ID NO: 320, or to the reference sequence corresponding to SEQ ID NO: 320, wherein the amino acid sequence comprises one or more substitutions relative to the reference sequence corresponding to residues 13 to 468 of SEQ ID NO: 320, or relative to the reference sequence corresponding to SEQ ID NO: 320.

[0035] In some embodiments, the engineered RNase inhibitor comprises an amino acid sequence having at least 70%, 75%, 80%, 81%, 82%, 83%, 84%, 85%, 86%, 87%, 88%, 89%, 90%, 91%, 92%, 93%, 94%, 95%, 96%, 97%, 98%, 99%, or more sequence identity to the reference sequence corresponding to residues 13 to 468 of an even-numbered SEQ ID NO. of SEQ ID NOs: 354-390, or to the reference sequence corresponding to an even-numbered SEQ ID NO. of SEQ ID NOs: 354-390, wherein the amino acid sequence comprises one or more substitutions relative to the reference sequence corresponding to residues 13 to 468 of SEQ ID NO: 320, or relative to the reference sequence corresponding to SEQ ID NO: 320.

[0036] In some embodiments, the amino acid sequence of the engineered RNase inhibitor comprises at least a substitution or substitution set at amino acid position(s) 13/145/228/291/348/351, 453, 12/13/453, 145/228/291/453, 13/145/453, 145/291/453, 38/145/453, 12/145/453, 38/145/228/453, 15/28/81/124/221/285/317, 15/28/64/203/221/285/317, 15/57/81/124/148/203, 12/453, 56/57/64/81/91/124/203/285/317, 66/90/142/176/205/319, 228/453, or 145/228/453, wherein the amino acid positions are relative to the reference sequence corresponding to residues 13 to 468 of SEQ ID NO: 320, or relative to the reference sequence corresponding to SEQ ID NO: 320.

[0037] In some embodiments, the engineered RNase inhibitor comprises an amino acid sequence having at least 70%, 75%, 80%, 81%, 82%, 83%, 84%, 85%, 86%, 87%, 88%, 89%, 90%, 91%, 92%, 93%, 94%, 95%, 96%, 97%, 98%, 99%, or more sequence identity to the reference sequence corresponding to residues 13 to 468 of SEQ ID NO: 360, or to the reference sequence corresponding to SEQ ID NO: 360, wherein the amino acid sequence comprises one or more substitutions relative to the reference sequence corresponding to residues 13 to 468 of SEQ ID NO: 360, or relative to the reference sequence corresponding to SEQ ID NO: 360.

[0038] In some embodiments, the engineered RNase inhibitor comprises an amino acid sequence having at least 70%, 75%, 80%, 81%, 82%, 83%, 84%, 85%, 86%, 87%, 88%, 89%, 90%, 91%, 92%, 93%, 94%, 95%, 96%, 97%, 98%, 99%, or more sequence identity to the reference sequence corresponding to residues 13 to 468 of an even-numbered SEQ ID NO. of SEQ ID NOs: 392-554, or to the reference sequence corresponding to an even-numbered SEQ ID NO. of SEQ ID NOs: 392-554, wherein the amino acid sequence comprises one or more substitutions relative to the reference sequence corresponding to residues 13 to 468 of SEQ ID NO: 360, or relative to the reference sequence corresponding to SEQ ID NO: 360.

[0039] In some embodiments, the amino acid sequence of the engineered RNase inhibitor comprises at least a substitution or substitution set at amino acid position(s) 319, 37, 60, 342, 81, 50, 395, 64, 177, 107, 373, 205, 35, 78, 228, 178, 285, 37/142/148/203/205/285/319, 50/81/90/124/147/148/203/205/285, 66/90/148/285/317/319, 28/37/91/142/205/285, 50/91/124/142/147/148/203/205/317/319, 50/66/90/91/124/142/285/317, 147/148/203/285/317/319, 50/66/81/90/205/319, 50/66/124/203/205/317/319, 28/66/84/90/91/142/205/319, 37/91/148/205/319, 28/66/81/124/147/285/319, 28/50/66/84/90/147/203/205/317, 28/50/90/91/124/142/319, 37/81/147/148/203/205, 28/66/81/90/91/124/203/285/317/319, 28/50/66/81/90/91/138/147/148/205/285/319, 28/37/50/124/319, 81/90/91/124/285/317, 50/90/142/203/285, 50/90/124/142/205/285/319, 28/66/90/91/147/148/205/319/326, 66/81/319, 28/66/90/203/205/319, 50/66/90/91/205, 50/66/147/205, 37/81/285, 50/66/90/91/319, 50/147/203/285, 37/50/81/148, 28/66/142/319, 15/28/66/81/90/91/147/148/319, 15/28/81/90/91/142/285/317/319, 15/28/37/50/66/124/147/148/205/285, 15/66/81/147/148, 66/91/124/142/147/148, 15/37/66/81/147/148/317/319, 15/50/90/91/124/142/147/285/317/319, 15/50/90/91/142/147/148/203/205, 15/28/81/142/147/148/285/317/319, 15/28/50/66/90/91/203/285/319, 15/66/90/91/147/148/205/285, 15/28/90/91/142/147/148/285/317/319, 15/37/91/148/285/319, 81/147/148/203/205, 147/148/285/319, 15/50/90/147/148, 15/66/81/90/285/319, 50/81/147/148/285, 37/147/148/285, 15/37/66/84/90/91/203/285/317, 15/84/90/91/203/285, 37/90/91/147, 90/91/205/317/319, 50/148/203/317, 15/28/50/66/81/84/90/285/317, 15/81/147, or 15/285, wherein the amino acid positions are relative to the reference sequence corresponding to residues 13 to 468 of SEQ ID NO: 360, or relative to the reference sequence corresponding to SEQ ID NO: 360.

[0040] In some embodiments, the engineered RNase inhibitor comprises an amino acid sequence having at least 70%, 75%, 80%, 81%, 82%, 83%, 84%, 85%, 86%, 87%, 88%, 89%, 90%, 91%, 92%, 93%, 94%, 95%, 96%, 97%, 98%, 99%, or more sequence identity to the reference sequence corresponding to residues 13 to 468 of SEQ ID NO: 442, or to the reference sequence corresponding to SEQ ID NO: 442, wherein the amino acid sequence comprises one or more substitutions relative to the reference sequence corresponding to residues 13 to 468 of SEQ ID NO: 442, or relative to the reference sequence corresponding to SEQ ID NO: 442.

[0041] In some embodiments, the engineered RNase inhibitor comprises an amino acid sequence having at least 70%, 75%, 80%, 81%, 82%, 83%, 84%, 85%, 86%, 87%, 88%, 89%, 90%, 91%, 92%, 93%, 94%, 95%, 96%, 97%, 98%, 99%, or more sequence identity to the reference sequence corresponding to residues 13 to 468 of an even-numbered SEQ ID NO. of SEQ ID NOs: 556-724, or to the reference sequence corresponding to an even-numbered SEQ ID NO. of SEQ ID NOs: 556-724, wherein the amino acid sequence comprises one or more substitutions relative to the reference sequence corresponding to residues 13 to 468 of SEQ ID NO: 442, or relative to the reference sequence corresponding to SEQ ID NO: 442.

[0042] In some embodiments, the amino acid sequence of the engineered RNase inhibitor comprises at least a substitution or substitution set at amino acid position(s) 78/260,396, 345, 37, 342, 395, 367, 38, 107, 228, 260, 57, 50/51, 338, 285/291/385, 175, 60, 145/147/148, 177, 28, 118, 64, 37/60/142/176/228/291/317, 60/64/317/319/342, 66/228/319/342/395, 37/142/291/317, 64/107/142/291/319/342/395, 37/60/317/319/342/395, 37/60/107/142/176/317/319/342, 142/317/319/342/395, 176/228/319/395, 228/291/342/395, 64/395, 64/107/142/176/228/319/342/395, 60/64/107/142/291/319/342, 37/66/107/291/317, 37/66/107/317/395, 37/228/317/395, 342/395, 66/142/319/342/395, 66/142/228/395, 363, 142/395, 60/64/177/291/395, 66/319, 64/107/177/228/291/317/395, 64/142/177/228/317, 60/228/317/395, 60/64/176/317/342, 177/228/342/395, 64/142/177/317/319, 60/64/107/342, 60/107/142/291/317/342/395, 66/228/319, 64/228/317/319, 168, 319/395, 37/107/228, 66/142, 37/342, 60/64/176/228/395, 60/64/342, 35, 60/66/395, 319, 291/317/319/342/395, 37/177,107, 37/60/64/142/291, 37/60/142/228/291, 60/319/342, 66/176/317/319/395, or 37/177/228, wherein the amino acid positions are relative to the reference sequence corresponding to residues 13 to 468 of SEQ ID NO: 442, or relative to the reference sequence corresponding to SEQ ID NO: 442.

[0043] In some embodiments, the engineered RNase inhibitor comprises an amino acid sequence having at least 70%, 75%, 80%, 81%, 82%, 83%, 84%, 85%, 86%, 87%, 88%, 89%, 90%, 91%, 92%, 93%, 94%, 95%, 96%, 97%, 98%, 99%, or more sequence identity to the reference sequence corresponding to residues 13 to 468 of SEQ ID NO: 578, or to the reference sequence corresponding to SEQ ID NO: 578, wherein the amino acid sequence comprises one or more substitutions relative to the reference sequence corresponding to residues 13 to 468 of SEQ ID NO: 578, or relative to the reference sequence corresponding to SEQ ID NO: 578.

[0044] The engineered RNase inhibitor of claim 20, comprising an amino acid sequence having at least 70%, 75%, 80%, 81%, 82%, 83%, 84%, 85%, 86%, 87%, 88%, 89%, 90%, 91%, 92%, 93%, 94%, 95%, 96%, 97%, 98%, 99%, or more sequence identity to the reference sequence corresponding to residues 13 to 468 of an even-numbered SEQ ID NO. of SEQ ID NOs: 726-824, or to the reference sequence corresponding to an even-numbered SEQ ID NO. of SEQ ID NOs: 726-824, wherein the amino acid sequence comprises one or more substitutions relative to the reference sequence corresponding to residues 13 to 468 of SEQ ID NO: 578, or relative to the reference sequence corresponding to SEQ ID NO: 578.

[0045] In some embodiments, the amino acid sequence of the engineered RNase inhibitor comprises at least a substitution set at amino acid positions 28/118/175/260/338/367, 118/168/260/396, 38/60/168/260/338/367, 28/38/57/60/260/363/367, 57/118/260/338/367, 57/118/168/177/260/338/367, 260/396, 28/118/168/260/367/396, 28/260/338, 28/60/168/260, 57/60/118/175/177/260/338, 28/57/260/338/367, 35/260/338/367, 118/175/260/338, 168/260, 57/60/168/177/260/338/367, 28/168/260/338, 260/367, 28/57/137/260, 38/60/175/260/338, 38/60/260/367/396, 57/60/260/363/367, 60/260/367, 28/38/60/260/367, 60/168,260/363/367, 177/260/363/367, 38/260, 28/60/118/177/260, 28/35/60/118/175/260, 60/367, 28/60/118, 57/118,118/260/338/396, 28/38/57/60/118/177/260/338/363/367/396, 28/38/60/260/363/367, 28/35/38/57/118/260/363/367, 28/57/60/168/260/367, 168/175/260/338/367, 57/60/168/260/338/363/367/396, 60/168/363/367/396, 28/38/57/60/118/168/260/367, 28/175/260/367, 60/363/367/396, 260/338/367, 28/57/260/338/363/367, 168/260/367, 367/396, 28/35/175/260/367/396, or 57/60/168/260/367, wherein the amino acid positions are relative to the reference sequence corresponding to residues 13 to 468 of SEQ ID NO: 578, or relative to the reference sequence corresponding to SEQ ID NO: 578.

[0046] In some embodiments, the amino acid sequence of the engineered RNase inhibitor comprises at least one substitution provided in Tables 8.1, 9.1, 9.2, 10.1, 11.1, 12.1, 12.2, 13.1, 13.2, 14.1, and 14.2, wherein the amino acid positions are relative to the reference sequence corresponding to residues 13 to 468 of SEQ ID NO: 36, 238, 320, 360, 442, or 578, or relative to the reference sequence corresponding to SEQ ID NO: 36, 238, 320, 360, 442, or 578.

[0047] In some embodiments, the amino acid sequence of the engineered RNase inhibitor comprises at least a substitution or substitution set of an RNase inhibitor variant provided in Tables 8.1, 9.1, 9.2, 10.1, 11.1, 12.1, 12.2, 13.1, 13.2, 14.1, and 14.2, wherein the amino acid positions are relative to the reference sequence corresponding to residues 13 to 468 of SEQ ID NO: 36, 238, 320, 360, 442, or 578, or relative to the reference sequence corresponding to SEQ ID NO: 36, 238, 320, 360, 442, or 578.

[0048] In some embodiments, the engineered RNase inhibitor comprises an amino acid sequence having at least 70%, 75%, 80%, 81%, 82%, 83%, 84%, 85%, 86%, 87%, 88%, 89%, 90%, 91%, 92%, 93%, 94%, 95%, 96%, 97%, 98%, 99% or more sequence identity to a reference sequence comprising a substitution or substitution set provided in Tables 8.1, 9.1, 9.2, 10.1, 11.1, 12.1, 12.2, 13.1, 13.2, 14.1, and 14.2, wherein the amino acid positions are relative to the reference sequence corresponding to residues 13 to 468 of SEQ ID NO: 2, 36, 238, 320, 360, 442, or 578, or relative to the reference sequence corresponding to SEQ ID NO: 2, 36, 238, 320, 360, 442, or 578.

[0049] In some embodiments, the engineered RNase inhibitor comprises an amino acid sequence having at least at least 70%, 75%, 80%, 81%, 82%, 83%, 84%, 85%, 86%, 87%, 88%, 89%, 90%, 91%, 92%, 93%, 94%, 95%, 96%, 97%, 98%, 99% or more sequence identity to the sequence comprising residues 13 to 468 of an engineered RNase inhibitor set forth in Tables 8.1, 9.1, 9.2, 10.1, 11.1, 12.1, 12.2, 13.1, 13.2, 14.1, and 14.2, or to the sequence of an engineered RNase inhibitor set forth in Tables 8.1, 9.1, 9.2, 10.1, 11.1, 12.1, 12.2, 13.1, 13.2, 14.1, and 14.2.

[0050] In some embodiments, the engineered RNase inhibitor comprises an amino acid sequence comprising residues 13 to 468 of an even numbered SEQ ID NO. of SEQ ID NOs: 26-824, or an amino acid sequence comprising an even numbered SEQ ID NO. of SEQ ID NOs: 26-824, optionally wherein the amino acid sequence has 1, 2, 3, 4, 5, 6, 7, 8, 9, or up to 10 substitutions.

[0051] In some embodiments, the engineered RNase inhibitor comprises an amino acid sequence comprising residues 13 to 468 of SEQ ID NO: 36, 238, 320, 360, 442, or 578, or an amino acid sequence comprising SEQ ID NO: 36, 238, 320, 360, 442, or 578, optionally wherein the amino acid sequence has 1, 2, 3, 4, 5, 6, 7, 8, 9, or up to 10 substitutions in the amino acid sequence.

[0052] In some embodiments, the engineered RNase inhibitor is characterized by at least one improved property as compared to a reference RNase inhibitor. In some embodiments, the improved property is selected from i) increased inhibitory activity against RNase A, ii) increased stability, iii) increased thermostability, iv) increased resistance to oxidation, and v) increased expression as soluble protein, or any combination of i), ii), iii), iv) and v), as compared to a reference RNase inhibitor. In some embodiments, the improved property of the engineered RNase inhibitor is in comparison to the reference RNase inhibitor having the sequence corresponding to residues 13 to 468 of SEQ ID NO: 2, 36, 238, 320, 360, 442, or 578, or the sequence corresponding to SEQ ID NO: 2, 36, 238, 320, 360, 442, or 578. In some embodiments, the reference RNase inhibitor has the sequence corresponding to residues 13 to 468 of SEQ ID NO: 2, or the sequence corresponding to SEQ ID NO: 2.

[0053] In some further embodiments, the engineered RNase inhibitor is purified. In some embodiments, the engineered RNase inhibitor is provided in solution, as a lyophilizate, or is immobilized on a substrate, such as surfaces of solid substrates, porous substrates, membranes, or particles.

[0054] In another aspect, the present disclosure provides recombinant polynucleotides encoding the engineered RNase inhibitors disclosed herein.

[0055] In some embodiments, the recombinant polynucleotide comprises a polynucleotide sequence having at least 70%, 75%, 80%, 81%, 82%, 83%, 84%, 85%, 90%, 91%, 92%, 93%, 94%, 95%, 96%, 97%, 98%, 99%, or more sequence identity to a reference polynucleotide sequence corresponding to nucleotide residues 37 to 1404 of an odd numbered SEQ ID NO. of SEQ ID NOs: 25-823, or to a reference polynucleotide sequence corresponding to an odd numbered SEQ ID NO. of SEQ ID NOs: 25-823, wherein the recombinant polynucleotide encodes an RNase inhibitor.

[0056] In some embodiments, the recombinant polynucleotide comprises a polynucleotide sequence having at least 70%, 75%, 75%, 80%, 81%, 82%, 83%, 84%, 85%, 90%, 91%, 92%, 93%, 94%, 95%, 96%, 97%, 98%, 99%, or more sequence identity to a reference polynucleotide sequence corresponding to nucleotide residues 37 to 1404 of SEQ ID NO: 35, 237, 319, 359, 441, or 577, or to a reference polynucleotide sequence corresponding to SEQ ID NO: 35, 237, 319, 359, 441, or 577, wherein the recombinant polynucleotide encodes an RNase inhibitor.

[0057] In some embodiments, the polynucleotide sequence of the recombinant polynucleotide encoding an engineered RNase inhibitor is codon optimized for expression in an organism or cell type thereof, for example a bacterial cell, fungal cell, insect cell, or mammalian cell.

[0058] In some embodiments, the recombinant polynucleotide comprises a polynucleotide sequence comprising nucleotide residues 37 to 1404 of SEQ ID NO. 35, 237, 319, 359, 441, or 577, or a polynucleotide sequence comprising SEQ ID NOs: 35, 237, 319, 359, 441, or 577.

[0059] In some embodiments, the recombinant polynucleotide comprises a polynucleotide sequence comprising nucleotide residues 37 to 1404 of an odd numbered SEQ ID NO. of SEQ ID NOs: 25-823, or a polynucleotide sequence comprising an odd numbered SEQ ID NO. of SEQ ID NOs: 25-823.

[0060] In a further aspect, the present disclosure provides expression vectors comprising at least one recombinant polynucleotide provided herein encoding an engineered RNase inhibitor. In some embodiments, the recombinant polynucleotide of the expression vector is operably linked to a control sequence. In some embodiments, the control sequence comprises a promoter, particularly a heterologous promoter.

[0061] In another aspect, the present disclosure also provides a host cell comprising at least one expression vector provided herein. In some embodiments, the host cell is a prokaryotic cell or a eukaryotic cell. In some embodiments, the host cell is a bacterial cell, fungal cell, insect cell, or mammalian cell. In some embodiments, the host cell is a bacterial cell, such as E. coli. or B. subtilis.

[0062] In a further aspect, the present disclosure provides a method of producing an engineered RNase inhibitor polypeptide, the method comprising culturing a host cell described herein under suitable culture conditions such that at least one engineered RNase inhibitor is produced. In some embodiments, the method further comprises recovering or isolating the engineered RNase inhibitor from the culture and/or host cells. In some embodiments, the method further comprises a step of purifying the engineered RNase inhibitor.

[0063] In another aspect, the present disclosure provides a composition comprising at least one engineered RNase inhibitor disclosed herein. In some embodiments, the composition comprises at least a buffer. In some embodiments, the buffer includes a reducing agent, such as dithiothreitol. In some embodiments, the composition comprises at least an RNA substrate. In some embodiments, the composition further comprises a cryoprotective agent. In some embodiments, the composition is a lyophilizate of the RNase inhibitor. In some embodiments, the composition comprises a complex of an engineered RNase inhibitor described herein and an RNase, such as RNase A.

[0064] In a further aspect, the present disclosure provides a method of inhibiting RNase, the method comprising contacting an RNase with an engineered RNase inhibitor described herein under suitable conditions for inhibiting the RNase. In some embodiments, the suitable conditions comprise a temperature of about 25° C. to about 75° C. In some embodiments, the suitable conditions comprise a temperature of 50° C. to about 75° C. In some embodiments, the RNase inhibited by the engineered RNase inhibitor is RNase A.

[0065] In some embodiments, the engineered RNase inhibitor is used in preparing or isolating a sample containing RNA. In some embodiments, the method comprises contacting a sample with an RNase inhibitor described herein. In some embodiments, the sample is a biological sample or environmental sample. In some embodiments, the sample is for conducting cDNA synthesis, RT-PCR, or in vitro RNA synthesis. In some embodiments, the sample is for isolating RNA in the sample.

[0066] In a further aspect, the present disclosure also provides a kit comprising at least one engineered RNase inhibitor disclosed herein. In some embodiments, the kit further comprises one or more of a buffer and RNA substrate. In some embodiments, the buffer comprises at least a reducing agent.

### DETAILED DESCRIPTION

[0067] The present disclosure provides engineered RNase inhibitor polypeptides and compositions thereof, as well as polynucleotides encoding the engineered RNase inhibitor polypeptides. The disclosure also provides methods of using the engineered RNase inhibitor polypeptides and compositions thereof for molecular biological, diagnostic, and other purposes. In some embodiments, the engineered RNase inhibitor polypeptides display, among others, increased activity, increased stability, and/or increased thermal stability.

### Abbreviations and Definitions

[0068] Unless defined otherwise, all technical and scientific terms used herein generally have the same meaning as commonly understood by one of ordinary skill in the art to which this invention pertains. Generally, the nomenclature used herein and the laboratory procedures of cell culture, molecular genetics, microbiology, organic chemistry, analytical chemistry and nucleic acid chemistry described below are those well-known and commonly employed in the art. Such techniques are well known and described in numerous texts and reference works well known to those of skill in the art. Standard techniques, or modifications thereof, are used for chemical syntheses and chemical analyses.

[0069] Although any suitable methods and materials similar or equivalent to those described herein find use in the practice of the present invention, exemplary methods and materials are described herein. It is to be understood that the present invention is not limited to the particular methodology, protocols, and reagents described, as these may vary, depending upon the context they are used by those of skill in the art. Accordingly, the terms defined immediately below are more fully described by reference to the application as a whole.

[0070] As used herein, the singular “a,” “an,” and “the” include the plural references, unless the context clearly indicates otherwise.

[0071] As used herein, the term “comprising” and its cognates are used in their inclusive sense (i.e., equivalent to the term “including” and its corresponding cognates).

[0072] It is also to be understood that where description of embodiments use the term “comprising” and its cognates, the embodiments can also be described using language “consisting essentially of” or “consisting of.”

[0073] Moreover, numeric ranges are inclusive of the numbers defining the range. Thus, every numerical range disclosed herein is intended to encompass every narrower numerical range that falls within such broader numerical range, as if such narrower numerical ranges were all expressly written herein. It is also intended that every maximum (or minimum) numerical limitation disclosed herein includes every lower (or higher) numerical limitation, as if such lower (or higher) numerical limitations were expressly written herein.

[0074] As used herein, the term “about” means an acceptable error for a particular value. In some instances “about” means within 0.05%, 0.5%, 1.0%, or 2.0%, of a given value range. In some instances, “about” means within 1, 2, 3, or 4 standard deviations of a given value.

[0075] Furthermore, the headings provided herein are not limitations of the various aspects or embodiments of the invention which can be had by reference to the application as a whole. Accordingly, the terms defined immediately below are more fully defined by reference to the application as a whole.

[0076] “ATCC” refers to the American Type Culture Collection whose biorepository collection includes genes and strains.

[0077] “NCBI” refers to National Center for Biological Information and the sequence databases provided therein.

[0078] “Protein,” “polypeptide,” and “peptide” are used interchangeably to denote a polymer of at least two amino acids covalently linked by an amide bond, regardless of length or post-translational modification (e.g., glycosylation or phosphorylation).

[0079] “Amino acid” and “amino acids” are referred to herein by either their commonly known three-letter symbols or by the one-letter symbols recommended by IUPAC-IUB Biochemical Nomenclature Commission. The abbreviations used for the genetically encoded amino acids are conventional and are as follows: alanine (Ala or A), arginine (Arg or R), asparagine (Asn or N), aspartate (Asp or D), cysteine (Cys or C), glutamate (Glu or E), glycine (Gly or G), glutamine (Gln or Q), histidine (His or H), isoleucine (Ile or I), leucine (Leu or L), lysine (Lys or K), methionine (Met or M), phenylalanine (Phe or F), proline (Pro or P), serine (Ser or S), threonine (Thr or T), tryptophan (Trp or W), tyrosine (Tyr or Y), and valine (Val or V). When the three-letter abbreviations are used, unless specifically preceded by an “L” or a “D” or clear from the context in which the abbreviation is used, the amino acid may be in either the L- or D-configuration about α-carbon (Cₐ). For example, whereas “Ala” designates alanine without specifying the configuration about the α-carbon, “D-Ala” and “L-Ala” designate D-alanine and L-alanine, respectively. When the one-letter abbreviations are used, upper case letters designate amino acids in the L-configuration about the α-carbon and lower case letters designate amino acids in the D-configuration about the xx-carbon. For example, “A” designates L-alanine and “a” designates D-alanine. When polypeptide sequences are presented as a string of one-letter or three-letter abbreviations (or mixtures thereof), the sequences are presented in the amino (N) to carboxy (C) direction in accordance with common convention.

[0080] “Fusion protein,” and “chimeric protein” and “chimera” refer to hybrid proteins created through the joining of two or more polynucleotides that originally encode separate proteins. In some embodiments, fusion proteins are created by recombinant technology (e.g., molecular biology techniques known in the art).

[0081] “RNase inhibitor” or “RI” or “RHN1” refers to a polypeptide that inhibits the activity of an RNase. Without being bound by any theory of operation, RNase inhibitors bind to RNase and block the enzyme active site. RNase inhibitors also interact with amino acid residues in the RNase important for binding to RNA and catalysis. RNase inhibitors are generally characterized by the presence of leucine-rich repeats (LRRs), which are 20-29 residue sequence motifs present in proteins that participate in protein-protein interactions.

[0082] “RNase” or “ribonuclease” refers to nucleases capable of catalyzing the degradation of RNA. A prototypical RNase is the family of RNase A ribonucleases.

[0083] “Polynucleotide,” “nucleic acid,” or “oligonucleotide” is used herein to denote a polymer comprising at least two nucleotides where the nucleotides are either deoxyribonucleotides or ribonucleotides or mixtures of deoxyribonucleotides and ribonucleotides. In some embodiments, the abbreviations used for genetically encoding nucleosides are conventional and are as follow: adenosine (A); guanosine (G); cytidine (C); thymidine (T); and uridine (U). Unless specifically delineated, the abbreviated nucleosides may be either ribonucleosides or 2′-deoxyribonucleosides. The nucleosides may be specified as being either ribonucleosides or 2′-deoxyribonucleosides on an individual basis or on an aggregate basis. When a polynucleotide, nucleic acid, or oligonucleotide sequences are presented as a string of one-letter abbreviations, the sequences are presented in the 5′ to 3′ direction in accordance with common convention, and the phosphates are not indicated. The term “DNA” refers to deoxyribonucleic acid. The term “RNA” refers to ribonucleic acid. The polynucleotide or nucleic acid may be single-stranded or double-stranded, or may include both single-stranded regions and double-stranded regions.

[0084] “Duplex” and “ds” refer to a double-stranded nucleic acid (e.g., DNA or RNA) molecule comprised of two single-stranded polynucleotides that are complementary in their sequence (A pairs to T or U, C pairs to G), arranged in an antiparallel 5′ to 3′ orientation, and held together by hydrogen bonds between the nucleobases (e.g., adenine [A], guanine [G], cytosine [C], thymine [T], uridine [U]).

[0085] “Engineered,” “recombinant,” “non-naturally occurring,” and “variant,” when used with reference to a cell, a polynucleotide or a polypeptide refer to a material or a material corresponding to the natural or native form of the material that has been modified in a manner that would not otherwise exist in nature or is identical thereto but produced or derived from synthetic materials and/or by manipulation using recombinant techniques.

[0086] “Wild-type” and “naturally-occurring” refer to the form found in nature. For example, a wild-type polypeptide or polynucleotide sequence is a sequence present in an organism that can be isolated from a source in nature and which has not been intentionally modified by human manipulation.

[0087] “Coding sequence” refers to that part of a nucleic acid (e.g., a gene) that encodes an amino acid sequence of a protein.

[0088] “Percent (%) sequence identity” refers to comparisons among polynucleotides and polypeptides, and are determined by comparing two optimally aligned sequences over a comparison window, wherein the portion of the polynucleotide or polypeptide sequence in the comparison window may comprise additions or deletions (i.e., gaps) as compared to the reference sequence for optimal alignment of the two sequences. The percentage may be calculated by determining the number of positions at which the identical nucleic acid base or amino acid residue occurs in both sequences to yield the number of matched positions, dividing the number of matched positions by the total number of positions in the window of comparison and multiplying the result by 100 to yield the percentage of sequence identity. Alternatively, the percentage may be calculated by determining the number of positions at which either the identical nucleic acid base or amino acid residue occurs in both sequences or a nucleic acid base or amino acid residue is aligned with a gap to yield the number of matched positions, dividing the number of matched positions by the total number of positions in the window of comparison and multiplying the result by 100 to yield the percentage of sequence identity. Those of skill in the art appreciate that there are many established algorithms available to align two sequences. Optimal alignment of sequences for comparison can be conducted, e.g., by the local homology algorithm of Smith and Waterman (Smith and Waterman, Adv. Appl. Math., 1981, 2:482), by the homology alignment algorithm of Needleman and Wunsch (Needleman and Wunsch, J. Mol. Biol., 1970, 48:443), by the search for similarity method of Pearson and Lipman (Pearson and Lipman, Proc. Natl. Acad. Sci. USA, 1988, 85:2444), by computerized implementations of these algorithms (e.g., GAP, BESTFIT, FASTA, and TFASTA in the GCG Wisconsin Software Package), or by visual inspection, as known in the art. Examples of algorithms that are suitable for determining percent sequence identity and sequence similarity include, but are not limited to the BLAST and BLAST 2.0 algorithms (see, e.g., Altschul et al., J. Mol. Biol., 1990, 215:403-410; and Altschul et al., Nucleic Acids Res., 1977, 3389-3402). Software for performing BLAST analyses is publicly available through the National Center for Biotechnology Information website. This algorithm involves first identifying high scoring sequence pairs (HSPs) by identifying short words of length “W” in the query sequence, which either match or satisfy some positive-valued threshold score “T,” when aligned with a word of the same length in a database sequence. T is referred to as the neighborhood word score threshold (see Altschul et al, supra). These initial neighborhood word hits act as seeds for initiating searches to find longer HSPs containing them. The word hits are then extended in both directions along each sequence for as far as the cumulative alignment score can be increased. Cumulative scores are calculated using, for nucleotide sequences, the parameters “M” (reward score for a pair of matching residues; always >0) and “N” (penalty score for mismatching residues; always <0). For amino acid sequences, a scoring matrix is used to calculate the cumulative score. Extension of the word hits in each direction are halted when: the cumulative alignment score falls off by the quantity “X” from its maximum achieved value; the cumulative score goes to zero or below, due to the accumulation of one or more negative-scoring residue alignments; or the end of either sequence is reached. The BLAST algorithm parameters W, T, and X determine the sensitivity and speed of the alignment. The BLASTN program (for nucleotide sequences) uses as defaults a wordlength (W) of 11, an expectation (E) of 10, M=5, N=−4, and a comparison of both strands. For amino acid sequences, the BLASTP program uses as defaults a wordlength (W) of 3, an expectation (E) of 10, and the BLOSUM62 scoring matrix (see, e.g., Henikoff and Henikoff, Proc. Natl. Acad. Sci. USA, 1989, 89:10915). Exemplary determination of sequence alignment and % sequence identity can employ the BESTFIT or GAP programs in the GCG Wisconsin Software package (Accelrys, Madison WI), using default parameters provided.

[0089] “Reference sequence” refers to a defined sequence used as a basis for a sequence comparison. A reference sequence may be a subset of a larger sequence, for example, a segment of a full-length gene or polypeptide sequence. Generally, a reference sequence is at least 20 nucleotide or amino acid residues in length, at least 25 residues in length, at least 50 residues in length, at least 100 residues in length or the full length of the nucleic acid or polypeptide. Since two polynucleotides or polypeptides may each (1) comprise a sequence (i.e., a portion of the complete sequence) that is similar between the two sequences, and (2) may further comprise a sequence that is divergent between the two sequences, sequence comparisons between two (or more) polynucleotides or polypeptide are typically performed by comparing sequences of the two polynucleotides or polypeptides over a “comparison window” to identify and compare local regions of sequence similarity. In some embodiments, a “reference sequence” can be based on a primary amino acid sequence, where the reference sequence is a sequence that can have one or more changes in the primary sequence. For instance, the phrase “a reference sequence corresponding to SEQ ID NO: 2, having an alanine at the residue corresponding to X28” (or “a reference sequence corresponding to SEQ ID NO: 2, having an alanine at the residue corresponding to position 28”) refers to a reference sequence in which the corresponding residue at position X28 in SEQ ID NO: 2 (e.g., a threonine), has been changed to alanine.

[0090] “Comparison window” refers to a conceptual segment of contiguous nucleotide positions or amino acids residues wherein a sequence may be compared to a reference sequence. In some embodiments, the comparison window is at least 15 to 20 contiguous nucleotides or amino acids and wherein the portion of the sequence in the comparison window may comprise additions or deletions (i.e., gaps) of 20 percent or less as compared to the reference sequence (which does not comprise additions or deletions) for optimal alignment of the two sequences. In some embodiments, the comparison window can be longer than 15-20 contiguous residues, and includes, optionally 30, 40, 50, 100, or longer windows.

[0091] “Corresponding to”, “reference to,” and “relative to” when used in the context of the numbering of a given amino acid or polynucleotide sequence refer to the numbering of the residues of a specified reference sequence when the given amino acid or polynucleotide sequence is compared to the reference sequence. In other words, the residue number or residue position of a given polymer is designated with respect to the reference sequence rather than by the actual numerical position of the residue within the given amino acid or polynucleotide sequence. For example, a given amino acid sequence, such as that of an engineered RNase inhibitor, can be aligned to a reference sequence by introducing gaps to optimize residue matches between the two sequences. In these cases, although the gaps are present, the numbering of the residue in the given amino acid or polynucleotide sequence is made with respect to the reference sequence to which it has been aligned. In some embodiments, the sequence is tagged (e.g., with a histidine tag).

[0092] “Mutation” refers to the alteration of a nucleic acid sequence. In some embodiments, mutations result in changes to the encoded polypeptide sequence (i.e., as compared to the original sequence without the mutation). In some embodiments, the mutation comprises a substitution, such that a different amino acid is produced. In some alternative embodiments, the mutation comprises an addition, such that an amino acid is added (e.g., insertion) to the original polypeptide sequence. In some further embodiments, the mutation comprises a deletion, such that an amino acid is deleted from the original polypeptide sequence. Any number of mutations may be present in a given sequence.

[0093] “Amino acid difference” and “residue difference” refer to a difference in the amino acid residue at a position of a polypeptide sequence relative to the amino acid residue at a corresponding position in a reference sequence. The positions of amino acid differences generally are referred to herein as “Xn,” where n refers to the corresponding position in the reference sequence upon which the residue difference is based. For example, a “residue difference at position X28 as compared to SEQ ID NO: 2” (or a “residue difference at position 28 as compared to SEQ ID NO: 2”) refers to a difference of the amino acid residue at the polypeptide position corresponding to position 28 of SEQ ID NO: 2. Thus, if the reference polypeptide of SEQ ID NO: 2 has a threonine at position 28, then a “residue difference at position X28 as compared to SEQ ID NO: 2” refers to an amino acid substitution of any residue other than threonine at the position of the polypeptide corresponding to position 28 of SEQ ID NO: 2. In some instances herein, the specific amino acid residue difference at a position is indicated as “XnY” where “Xn” specified the corresponding residue and position of the reference polypeptide (as described above), and “Y” is the single letter identifier of the amino acid found in the engineered polypeptide (i.e., the different residue than in the reference polypeptide). In some instances (e.g., in the Tables in the Examples), the present disclosure also provides specific amino acid differences denoted by the conventional notation “AnB”, where A is the single letter identifier of the residue in the reference sequence, “n” is the number of the residue position in the reference sequence, and B is the single letter identifier of the residue substitution in the sequence of the engineered polypeptide. In some instances, where relevant, an amino acid residue difference or substitution may be a deletion and may be denoted by a “-”. In some embodiments, the amino acid difference, e.g., a substitution, is denoted by the abbreviation “nB,” without the identifier for the residue in the reference sequence. In some embodiments, the phrase “an amino acid residue nB” denotes the presence of the amino residue in the engineered polypeptide, which may or may not be a substitution in context of a reference polypeptide or amino acid sequence.

[0094] In some instances, a polypeptide of the present disclosure can include one or more amino acid residue differences relative to a reference sequence, which is indicated by a list of the specified positions where residue differences are present relative to the reference sequence. In some embodiments, where more than one amino acid can be used in a specific residue position of a polypeptide, the various amino acid residues that can be used are separated by a “/” (e.g., X28A/X28H, X28A/H, or 28A/H). The present disclosure includes engineered polypeptide sequences comprising one or more amino acid differences that include either/or both conservative and non-conservative amino acid substitutions, as well as insertions and deletions of amino acids in the sequence.

[0095] “Amino acid substitution set” and “substitution set” refers to a group of amino acid substitutions within a polypeptide sequence. In some embodiments, substitution sets comprise 2, 3, 4, 5, 6, 7, 8, 9, 10, 11, 12, 13, 14, 15, or more amino acid substitutions. In some embodiments, a substitution set refers to the set of amino acid substitutions that is present in any of the variant RNase inhibitor polypeptides listed in any of the Tables in the Examples. In these substitution sets, the individual substitutions are separated by a semicolon (“;”; e.g., R257F;G459E) or slash (“/”; e.g., R257F/G459E or 257F/459E).

[0096] “Conservative amino acid substitution” refers to a substitution of a residue with a different residue having a similar side chain, and thus typically involves substitution of the amino acid in the polypeptide with amino acids within the same or similar defined class of amino acids. By way of example and not limitation, an amino acid with an aliphatic side chain may be substituted with another aliphatic amino acid (e.g., alanine, valine, leucine, and isoleucine); an amino acid with hydroxyl side chain is substituted with another amino acid with a hydroxyl side chain (e.g., serine and threonine); an amino acids having aromatic side chains is substituted with another amino acid having an aromatic side chain (e.g., phenylalanine, tyrosine, tryptophan, and histidine); an amino acid with a basic side chain is substituted with another amino acid with a basis side chain (e.g., lysine and arginine); an amino acid with an acidic side chain is substituted with another amino acid with an acidic side chain (e.g., aspartic acid or glutamic acid); and a hydrophobic or hydrophilic amino acid is replaced with another hydrophobic or hydrophilic amino acid, respectively.

[0097] “Non-conservative substitution” refers to substitution of an amino acid in the polypeptide with an amino acid with significantly differing side chain properties. Non-conservative substitutions may use amino acids between, rather than within, the defined groups and affect: (a) the structure of the peptide backbone in the area of the substitution (e.g., proline for glycine); (b) the charge or hydrophobicity; and/or (c) the bulk of the side chain. By way of example and not limitation, exemplary non-conservative substitutions include an acidic amino acid substituted with a basic or aliphatic amino acid; an aromatic amino acid substituted with a small amino acid; and a hydrophilic amino acid substituted with a hydrophobic amino acid.

[0098] “Deletion” refers to modification to the polypeptide by removal of one or more amino acids from the reference polypeptide. Deletions can comprise removal of 1 or more amino acids, 2 or more amino acids, 5 or more amino acids, 10 or more amino acids, 15 or more amino acids, or 20 or more amino acids, up to 10% of the total number of amino acids, or up to 20% of the total number of amino acids making up the reference polypeptide while retaining biological activity and/or retaining the improved properties of an engineered RNase inhibitor. Deletions can be directed to the internal portions and/or terminal portions of the polypeptide. In various embodiments, the deletion can comprise a continuous segment or can be discontinuous. As discussed herein, in some embodiments, deletions can be indicated by “-”, and may be present in substitution sets.

[0099] “Insertion” refers to modification to the polypeptide by addition of one or more amino acids from the reference polypeptide. Insertions can be in the internal portions of the polypeptide, or to the carboxy or amino terminus. Insertions as used herein include fusion proteins as is known in the art. The insertion can be a contiguous segment of amino acids or separated by one or more of the amino acids in the naturally-occurring or engineered polypeptide.

[0100] “Functional fragment” and “biologically active fragment” are used interchangeably herein, to refer to a polypeptide that has an amino-terminal and/or carboxy-terminal deletion(s) and/or internal deletions, but where the remaining amino acid sequence is identical to the corresponding positions in the sequence to which it is being compared (e.g., a full length engineered RNase inhibitor of the present disclosure) and that retains substantially all of the activity of the full-length polypeptide.

[0101] “Isolated polypeptide” refers to a polypeptide which is substantially separated from other contaminants that naturally accompany it (e.g., protein, lipids, and polynucleotides). The term embraces polypeptides which have been removed or purified from their naturally-occurring environment or expression system (e.g., host cell or in vitro synthesis). The recombinant RNase inhibitor polypeptides may be present within a cell, present in the cellular medium, or prepared in various forms, such as lysates or isolated preparations. As such, in some embodiments, the recombinant RNase inhibitor polypeptides provided herein are isolated polypeptides.

[0102] “Substantially pure polypeptide” or “purified polypeptide” refers to a composition in which the polypeptide species is the predominant species present (i.e., on a molar or weight basis it is more abundant than any other individual macromolecular species in the composition), and is generally a substantially purified composition when the object species comprises at least about 50 percent of the macromolecular species present by mole or % weight. Generally, a substantially pure RNase inhibitor composition will comprise about 60% or more, about 70% or more, about 80% or more, about 90% or more, about 95% or more, and about 98% or more of all macromolecular species by mole or % weight present in the composition. In some embodiments, the object species is purified to essential homogeneity (i.e., contaminant species cannot be detected in the composition by conventional detection methods) wherein the composition consists essentially of a single macromolecular species. Solvent species, small molecules (<500 Daltons), and elemental ion species are not considered macromolecular species. In some embodiments, the isolated recombinant RNase inhibitor polypeptides are substantially pure polypeptide compositions.

[0103] “Improved property” refers to an engineered RNase inhibitor polypeptide that exhibits an improvement in any RNase inhibitor property as compared to a reference RNase inhibitor polypeptide, such as a wild-type RNase inhibitor polypeptide or another engineered RNase inhibitor polypeptide.

[0104] Improved properties include but are not limited to such properties as increased protein expression, increased thermoactivity, increased thermostability, increased stability, increased pH stability, increased inhibitory activity, increased affinity to an RNase, increased substrate range, increased chemical stability, improved solvent stability, and increased solubility.

[0105] “Increased inhibitor activity” and “enhanced inhibitor activity” refer to an improved property of the engineered RNase inhibitor polypeptides, which can be represented by an increase in specific inhibitory activity as compared to the reference RNase inhibitor polypeptide (e.g., wild-type RNase inhibitor and/or another engineered RNase inhibitor). Exemplary methods to determine inhibitory activity are provided in the Examples. Improvements in inhibitory activity can be from about 1.1 fold the inhibitory activity of the corresponding wild-type polypeptide, to about 1.5 fold, 2-fold, 5-fold, 10-fold, 20-fold, 25-fold, 50-fold, 75-fold, 100-fold, 150-fold, 200-fold or more inhibitory activity than the naturally-occurring RNase inhibitor or another engineered RNase inhibitor from which the RNase inhibitor polypeptides were derived. In some embodiments, increased inhibitor activity is reflected in increased affinity of the RNase inhibitor to an RNase.

[0106] “Hybridization stringency” relates to hybridization conditions, such as washing conditions, in the hybridization of nucleic acids. Generally, hybridization reactions are performed under conditions of lower stringency, followed by washes of varying but higher stringency (see, e.g., Sambrook et al., Molecular Cloning: A Laboratory Manual, Cold Spring Harbor Laboratory Press, New York, 2001; Ausubel et al., Current Protocols in Molecular Biology, John Wiley & Sons, 2003). The term “moderately stringent hybridization” refers to conditions that permit target-DNA to bind a complementary nucleic acid that has about 60% identity, preferably about 75% identity, about 85% identity to the target polynucleotide or DNA, with greater than about 90% identity to target-polynucleotide. Exemplary moderately stringent conditions are conditions equivalent to hybridization in 50% formamide, 5× Denhart's solution, 5×SSPE, 0.2% SDS at 42° C., followed by washing in 0.2×SSPE, 0.2% SDS, at 42° C. “High stringency hybridization” refers generally to conditions that are about 10° C. or less from the thermal melting temperature Tₘ as determined under the solution condition for a defined polynucleotide sequence. In some embodiments, a high stringency condition refers to conditions that permit hybridization of only those nucleic acid sequences that form stable hybrids in 0.018M NaCl at 65° C. (i.e., if a hybrid is not stable in 0.018M NaCl at 65° C., it will not be stable under high stringency conditions, as contemplated herein). High stringency conditions can be provided, for example, by hybridization in conditions equivalent to 50% formamide, 5× Denhart's solution, 5×SSPE, 0.2% SDS at 42° C., followed by washing in 0.1×SSPE, and 0.1% SDS at 65° C. Another high stringency condition comprises hybridizing in conditions equivalent to hybridizing in 5×SSC containing 0.1% (w:v) SDS at 65° C. and washing in 0.1×SSC containing 0.1% SDS at 65° C. Other high stringency hybridization conditions, as well as moderately stringent conditions, are described in the references cited above.

[0107] “Codon optimized” refers to changes in the codons of the polynucleotide encoding a protein to those preferentially used in a particular organism such that the encoded protein is more efficiently expressed in that organism. Although the genetic code is degenerate, in that most amino acids are represented by several codons, called “synonyms” or “synonymous” codons, it is well known that codon usage by particular organisms is nonrandom and biased towards particular codon triplets. This codon usage bias may be higher in reference to a given gene, genes of common function or ancestral origin, highly expressed proteins versus low copy number proteins, and the aggregate protein coding regions of an organism's genome. In some embodiments, the polynucleotides encoding the RNase inhibitor polypeptides are codon optimized for optimal production from the host organism selected for expression.

[0108] “Control sequence” refers herein to include all components that are necessary or advantageous for the expression of a polynucleotide and/or polypeptide of the present disclosure. Each control sequence may be native or foreign (e.g., heterologous) to the nucleic acid sequence encoding the polypeptide. Such control sequences include, but are not limited to, leaders, polyadenylation sequences, propeptide sequences, promoter sequences, signal peptide sequences, initiation sequences, and transcription terminators. At a minimum, the control sequences include a promoter, and transcriptional and translational stop signals. In some embodiments, the control sequences are provided with linkers for the purpose of introducing specific restriction sites facilitating ligation of the control sequences with the coding region of the nucleic acid sequence encoding a polypeptide.

[0109] “Operably linked” or “operatively linked” refers to a configuration in which a control sequence is appropriately placed (i.e., in a functional relationship) at a position relative to a polynucleotide of interest such that the control sequence directs or regulates the expression of the polynucleotide, and where relevant, expression of an encoded polypeptide of interest.

[0110] “Promoter” or “promoter sequence” refers to a nucleic acid sequence that is recognized by a host cell for expression of a polynucleotide of interest, such as a coding sequence. The promoter sequence contains transcriptional control sequences that mediate the expression of a polynucleotide of interest. The promoter may be any nucleic acid sequence which shows transcriptional activity in the host cell of choice including mutant, truncated, and hybrid promoters, and may be obtained from genes encoding extracellular or intracellular polypeptides either homologous or heterologous to the host cell.

[0111] “Suitable reaction conditions” or “suitable conditions” refers to those conditions in the inhibition of RNase (e.g., temperature, pH, buffers, co-solvents, etc.) under which an RNase inhibitor polypeptide of the present disclosure is capable of inhibiting the action of RNase in degrading RNA. Exemplary “suitable conditions” are provided herein (see, the Examples).

[0112] “Culturing” refers to the growing of a population of cells under suitable conditions using any suitable medium (e.g., liquid, gel, or solid).

[0113] “Vector” is a recombinant construct for introducing a polynucleotide of interest into a cell. In some embodiments, the vector is an expression vector that is operably linked to a suitable control sequence capable of effecting the expression in a suitable host of the polynucleotide or a polypeptide encoded in the polynucleotide. In some embodiments, an “expression vector” has a promoter sequence operably linked to the polynucleotide (e.g., transgene) to drive expression in a host cell, and in some embodiments, also comprises a transcription terminator sequence.

[0114] “Expression” includes any step involved in the production of the polypeptide including, but not limited to, transcription, post-transcriptional modification, translation, and post-translational modification. In some embodiments, the term also encompasses secretion of the polypeptide from a cell.

[0115] “Produces” refers to the production of proteins and/or other compounds by cells. It is intended that the term encompass any step involved in the production of polypeptides including, but not limited to, transcription, post-transcriptional modification, translation, and post-translational modification. In some embodiments, the term also encompasses secretion of the polypeptide from a cell.

[0116] “Heterologous” or “recombinant” refers to the relationship between two or more nucleic acid or polypeptide sequences (e.g., a promoter sequence, signal peptide, terminator sequence, etc.) that are derived from different sources and are not associated in nature.

[0117] “Host cell” and “host strain” refer to suitable hosts for expression vectors comprising a polynucleotide provided herein (e.g., a polynucleotide sequences encoding at least one RNase inhibitor variant). In some embodiments, the host cells are prokaryotic or eukaryotic cells that have been transformed or transfected with vectors constructed using recombinant DNA techniques as known in the art.

[0118] “Analogue” in the context of a polypeptide means a polypeptide more than 70% sequence identity but less than 100% sequence identity (e.g., more than 75%, 78%, 80%, 83%, 85%, 88%, 90%, 91%, 92%, 93%, 94%, 95%, 96%, 97%, 98%, 99% sequence identity) with a reference polypeptide. In some embodiments, analogues include non-naturally-occurring amino acid residues including, but not limited, to homoarginine, ornithine and norvaline, as well as naturally-occurring amino acids. In some embodiments, analogues also include one or more D-amino acid residues and non-peptide linkages between two or more amino acid residues.

[0119] “Sample” as used herein refers to a material or substance for reaction with an RNase inhibitor. In some embodiments, the sample is a “biological sample,” which refers to sample of biological tissue or fluid. Such samples are typically from humans, but include tissues isolated from non-human primates, mammals, including domesticated animals (e.g., cats, dogs, pigs, cattle, horses, etc.), or rodents (e.g., mice, and rats), and includes sections of tissues such as biopsy and autopsy samples, frozen sections taken for histological purposes, blood, plasma, serum, sputum, stool, tears, mucus, hair, skin, etc. A “biological sample” also refers to a cell or population of cells or a quantity of tissue or fluid from organisms. In some embodiments, the biological sample has been removed from an animal, but the term “biological sample” can also refer to cells or tissue analyzed in vivo, i.e., without removal from the animal, including cell cultures. Typically, a “biological sample” will contain cells from the animal or of organisms, but the term can also refer to non-cellular biological material, such as non-cellular fractions of blood, saliva, or urine. Numerous types of biological samples can be used with the polypeptide, compositions, and method in the present disclosure, including, but not limited to, a tissue biopsy, a blood sample, a buccal scrape, a saliva sample, or a nipple discharge. As used herein, a “tissue biopsy” refers to an amount of tissue removed from an animal, preferably a human, for diagnostic analysis. In a patient with cancer, tissue may be removed from a tumor, allowing the analysis of cells within the tumor. “Tissue biopsy” can refer to any type of biopsy, such as needle biopsy, fine needle biopsy, surgical biopsy, etc. In some embodiments, a sample can be from environmental sources, by way of example and not limitation, water (e.g., ocean, river, refuse/sewer, etc.), soil, air, vents, or surfaces (e.g., floors, machinery, counters, etc.).

### Engineered RNase Inhibitor Polypeptides

[0120] In one aspect, the present disclosure provides RNase inhibitors, including engineered RNase inhibitor polypeptide variants. In some embodiments, the RNase inhibitors are engineered to have improved properties, including, among others, increased activity, increased stability, and increased thermostability. In some embodiments, the engineered RNase inhibitor variants find use in applications involving RNA, such as RNA isolation, RT-PCR, RNA-protein binding assays, RNA sequencing, and cDNA library synthesis.

[0121] In some embodiments, the engineered RNase inhibitor comprises an amino acid sequence having at least 70%, 75%, 80%, 81%, 82%, 83%, 84%, 85%, 86%, 87%, 88%, 89%, 90%, 91%, 92%, 93%, 94%, 95%, 96%, 97%, 98%, 99%, or more sequence identity to a reference sequence corresponding to residues 13 to 468 of an even numbered SEQ ID NO. of SEQ ID NOs: 2 and 26-824, or to a reference sequence corresponding to an even numbered SEQ ID NO. of SEQ ID NOs: 2 and 26-824, wherein the amino acid sequence comprises one or more substitutions relative to the reference sequence corresponding to residues 13 to 468 of SEQ ID NO: 2, 36, 238, 320, 360, 442, or 578, or relative to the reference sequence corresponding to SEQ ID NO: 2, 36, 238, 320, 360, 442, or 578.

[0122] In some embodiments, the engineered RNase inhibitor comprises an amino acid sequence having at least 70%, 75%, 80%, 81%, 82%, 83%, 84%, 85%, 86%, 87%, 88%, 89%, 90%, 91%, 92%, 93%, 94%, 95%, 96%, 97%, 98%, 99%, or more sequence identity to a reference sequence corresponding to residues 13 to 468 of SEQ ID NO: 2, 36, 238, 320, 360, 442, or 578, or to a reference sequence corresponding to SEQ ID NO: 2, 36, 238, 320, 360, 442, or 578, wherein the amino acid sequence comprises one or more substitutions relative to the reference sequence corresponding to residues 13 to 468 of SEQ ID NO: 2, 36, 238, 320, 360, 442, or 578, or relative to the reference sequence corresponding to SEQ ID NO: 2, 36, 238, 320, 360, 442, or 578.

[0123] In some embodiments, the engineered RNase inhibitor comprises an amino acid sequence having at least 70%, 75%, 80%, 81%, 82%, 83%, 84%, 85%, 86%, 87%, 88%, 89%, 90%, 91%, 92%, 93%, 94%, 95%, 96%, 97%, 98%, 99%, or more sequence identity to the reference sequence corresponding to residues 13 to 468 of SEQ ID NO: 2, or to the reference sequence corresponding to SEQ ID NO: 2, wherein the amino acid sequence comprises one or more substitutions relative to the reference sequence corresponding to residues 13 to 468 of SEQ ID NO: 2, or relative to the reference sequence corresponding to SEQ ID NO: 2.

[0124] In some embodiments, the engineered RNase inhibitor comprises an amino acid sequence having at least 70%, 75%, 80%, 81%, 82%, 83%, 84%, 85%, 86%, 87%, 88%, 89%, 90%, 91%, 92%, 93%, 94%, 95%, 96%, 97%, 98%, 99%, or more sequence identity to the reference sequence corresponding to residues 13 to 468 of SEQ ID NO: 36, 238, 320, 360, 442, or 578, or to the reference sequence corresponding to SEQ ID NO: 36, 238, 320, 360, 442, or 578, wherein the amino acid sequence comprises one or more substitutions relative to the reference sequence corresponding to residues 13 to 468 of SEQ ID NO: 2, or relative to the reference sequence corresponding to SEQ ID NO: 2.

[0125] In some embodiments, the engineered RNase inhibitor comprises an amino acid sequence having at least 70%, 75%, 80%, 81%, 82%, 83%, 84%, 85%, 86%, 87%, 88%, 89%, 90%, 91%, 92%, 93%, 94%, 95%, 96%, 97%, 98%, 99% or more sequence identity to a reference sequence corresponding to residues 13 to 468 of an even numbered SEQ ID NO. of SEQ ID NOs: 26-824, or to a reference sequence corresponding to an even numbered SEQ ID NO. of SEQ ID NOs: 26-824, wherein the amino acid sequence comprises one or more substitutions relative to the reference sequence corresponding to residues 13 to 468 of SEQ ID NO: 2, or relative to the reference sequence corresponding to SEQ ID NO: 2.

[0126] In some embodiments, the engineered RNase inhibitor comprises an amino acid sequence having at least 70%, 75%, 80%, 81%, 82%, 83%, 84%, 85%, 86%, 87%, 88%, 89%, 90%, 91%, 92%, 93%, 94%, 95%, 96%, 97%, 98%, 99% or more sequence identity to a reference sequence corresponding to residues 13 to 468 of an even numbered SEQ ID NO. of SEQ ID NOs: 26-142, or to a reference sequence corresponding to an even numbered SEQ ID NO. of SEQ ID NOs: 26-142, wherein the amino acid sequence comprises one or more substitutions relative to the reference sequence corresponding to residues 13 to 468 of SEQ ID NO: 2, or relative to the reference sequence corresponding to SEQ ID NO: 2.

[0127] In some embodiments, the amino acid sequence of the engineered RNase inhibitor comprises at least a substitution at amino acid position 12, 13, 15, 28, 35, 37, 38, 40, 50, 51, 56, 57, 60, 64, 66, 78, 81, 83, 84, 90, 91, 94, 95, 107, 113, 118, 121, 124, 126, 135, 137, 138, 142, 145, 147, 148, 150, 156, 158, 167, 168, 173, 175, 176, 177, 178, 203, 205, 221, 228, 230, 237, 243, 257, 260, 265, 267, 272, 285, 291, 296, 317, 319, 323, 326, 332, 338, 341, 342, 345, 348, 351, 363, 367, 373, 377, 385, 386, 390, 395, 396, 400, 417, 419, 422, 429, 430, 452, 453, 459, or 466, or combinations thereof, wherein the amino acid positions are relative to the reference sequence corresponding to residues 13 to 468 of SEQ ID NO: 2, or relative to the reference sequence corresponding to SEQ ID NO: 2.

[0128] In some embodiments, the amino acid sequence of the engineered RNase inhibitor comprises at least a substitution 12K, 13T, 15R, 28A/H, 35R, 37A/C, 38A/C/R/T, 401, 50Q/S, 51H, 56A, 57M/T/V, 60K/S, 64R/V, 661, 78K/T, 81F/M/T/V, 83L, 84I/V, 90G, 91K, 94L, 95E/Q, 107A/D/I/V, 113G, 118R, 121S, 124A, 126V, 135V, 137V, 138L, 142H/Q, 145E/G/I/M/S/V, 147E, 148N, 150Q, 156M, 158C, 167K, 168F/I, 173I, 175F, 176S, 177T/V, 178D, 203E, 205I/L/P/V, 221S, 228A/L/K/R/Q, 230L, 237R, 243C/M/R/S, 257F/G/S/T/V, 260L/S/Y, 265L, 267H/K/R/T, 272N/Q, 285K/Q, 291E/S, 296I/L, 317S, 319G/T, 323E, 326L, 332L, 338V, 341C, 342A/H/M, 345A/S, 348K, 351K/R, 363E/M, 367A/L/V, 373A, 377S/T, 385A, 386G, 390G/S/T, 395C/E/I/L/M/V, 396A, 400L, 417L, 419D, 422V, 429L, 430G/L, 452K/R, 453A/F/K/L/M/R/W, 459E/K/M, or 466I, or combinations thereof, wherein the amino acid positions are relative to the reference sequence corresponding to residues 13 to 468 of SEQ ID NO: 2, or relative to the reference sequence corresponding to SEQ ID NO: 2.

[0129] In some embodiments, the amino acid sequence of the engineered RNase inhibitor comprises at least a substitution T12K, M13T, L15R, T28A/H, Q35R, S37A/C, E38A/C/R/T, V40I, M50Q/S, R51H, S56A, S57M/T/V, Q60K/S, S64R/V, T66I, A78K/T, H81F/M/T/V, V83L, L84I/V, P90G, T91K, 194L, R95E/Q, T107A/D/I/V, P113G, S118R, T121S, E124A, Y126V, A135V, L137V, Q138L, S142H/Q, L145E/G/I/M/S/V, P147E, Q148N, H150Q, V156M, Y158C, E167K, S168F/I, L173I, A175F, K176S, R177T/V, H178D, D203E, A205I/L/P/V, A221S, G228A/L/K/R/Q, V230L, Q237R, D243C/M/R/S, R257F/G/S/T/V, H260L/S/Y, I265L, V267H/K/R/T, V272N/Q, R285K/Q, E291P/S, M296I/L, E317S, A319G/T, Q323E, W326L, F332L, Q338V, S341C, S342A/H/M, T345A/S, T348K, V351K/R, C363E/M, Q367A/L/V, S373A, A377S/T, G385A, D386G, A390G/S/T, A395C/E/I/L/M/V, S396A, V400L, M417L, E419D, I422V, V429L, E430G/L, N452K/R, S453A/F/K/L/M/R/W, G459E/K/M, or V466I, or combinations thereof, wherein the amino acid positions are relative to the reference sequence corresponding to residues 13 to 468 of SEQ ID NO: 2, or relative to the reference sequence corresponding to SEQ ID NO: 2.

[0130] In some embodiments, the amino acid sequence of the engineered RNase inhibitor comprises at least a substitution at amino acid position 50, 64, 81, 90, 95, 107, 113, 124, 142, 145, 147, 148, 176, 203, 205, 228, 243, 257, 272, 285, 291, 296, 319, 323, 342, 348, 390, 395, 452, 453, or 459, or combinations thereof, wherein the amino acid positions are relative to the reference sequence corresponding to residues 13 to 468 of SEQ ID NO: 2, or relative to the reference sequence corresponding to SEQ ID NO: 2.

[0131] In some embodiments, the amino acid sequence of the engineered RNase inhibitor comprises at least a substitution or amino acid residue 50Q/S, 64R/V, 81F/M/T/V, 90G, 95E, 107A/D/I/V, 113G, 124A, 142H/Q, 145E/G/I/M/S/V, 147E, 148N, 176S, 203E, 205I/P, 228A/L/K/R/Q, 243C/M/R/S, 257F/G/S/T/V, 272N/Q, 285K/Q, 291P/S, 296I/L, 319G/T, 323E, 342A/H/M, 348K, 390G/S/T, 395C/E/I/L/M/V, 452K/R, 453A/F/K/L/M/R/W, or 459E/K/M, or combinations thereof, wherein the amino acid positions are relative to the reference sequence corresponding to residues 13 to 468 of SEQ ID NO: 2, or relative to the reference sequence corresponding to SEQ ID NO: 2.

[0132] In some embodiments, the amino acid sequence of the engineered RNase inhibitor comprises at least a substitution or amino acid residue 50S, 64R, 81T, 90G, 95E, 107D, 113G, 124A, 142Q, 145V, 147E, 148N, 176S, 203E, 205P, 228L/R, 243M, 257T, 272N, 285Q, 291P, 296L, 319G, 323E, 342M, 348K, 390G, 395L, 452R, 453R, or 459E, or combinations thereof, wherein the amino acid positions are relative to the reference sequence corresponding to residues 13 to 468 of SEQ ID NO: 2, or relative to the reference sequence corresponding to SEQ ID NO: 2.

[0133] In some embodiments, the amino acid sequence of the engineered RNase inhibitor comprises at least a substitution at amino acid position 95, 296, or 459, or combinations thereof, wherein the amino acid positions are relative to the reference sequence corresponding to residues 13 to 468 of SEQ ID NO: 2, or relative to the reference sequence corresponding to SEQ ID NO: 2.

[0134] In some embodiments, the amino acid sequence of the engineered RNase inhibitor comprises at least a substitution 95E, 296L, or 459E, or combinations thereof, wherein the amino acid positions are relative to the reference sequence corresponding to residues 13 to 468 of SEQ ID NO: 2, or relative to the reference sequence corresponding to SEQ ID NO: 2.

[0135] In some embodiments, the amino acid sequence of the engineered RNase inhibitor comprises at least a substitution R95E, M296L, or G459E, or combinations thereof, wherein the amino acid positions are relative to the reference sequence corresponding to residues 13 to 468 of SEQ ID NO: 2, or relative to the reference sequence corresponding to SEQ ID NO: 2.

[0136] In some embodiments, the amino acid sequence of the engineered RNase inhibitor comprises at least a substitution at amino acid position 113, 243, 257, 272, or 390, or combinations thereof, wherein the amino acid positions are relative to the reference sequence corresponding to residues 13 to 468 of SEQ ID NO: 2, or relative to the reference sequence corresponding to SEQ ID NO: 2.

[0137] In some embodiments, the amino acid sequence of the engineered RNase inhibitor comprises at least a substitution 113G, 243M, 257T, 272N, or 390G, or combinations thereof, wherein the amino acid positions are relative to the reference sequence corresponding to residues 13 to 468 of SEQ ID NO: 2, or relative to the reference sequence corresponding to SEQ ID NO: 2.

[0138] In some embodiments, the amino acid sequence of the engineered RNase inhibitor comprises at least a substitution P113G, D243M, R257T, D272N, or A390G, or combinations thereof, wherein the amino acid positions are relative to the reference sequence corresponding to residues 13 to 468 of SEQ ID NO: 2, or relative to the reference sequence corresponding to SEQ ID NO: 2.

[0139] In some embodiments, the amino acid sequence of the engineered RNase inhibitor comprises at least a substitution at amino acid position 323, 348, or 452, or combinations thereof, wherein the amino acid positions are relative to the reference sequence corresponding to residues 13 to 468 of SEQ ID NO: 2, or relative to the reference sequence corresponding to SEQ ID NO: 2.

[0140] In some embodiments, the amino acid sequence of the engineered RNase inhibitor comprises at least a substitution 323E, 348K, or 452R, or combinations thereof, wherein the amino acid positions are relative to the reference sequence corresponding to residues 13 to 468 of SEQ ID NO: 2, or relative to the reference sequence corresponding to SEQ ID NO: 2.

[0141] In some embodiments, the amino acid sequence of the engineered RNase inhibitor comprises at least a substitution Q323E, T348K, or N452R, or combinations thereof, wherein the amino acid positions are relative to the reference sequence corresponding to residues 13 to 468 of SEQ ID NO: 2, or relative to the reference sequence corresponding to SEQ ID NO: 2.

[0142] In some embodiments, the amino acid sequence of the engineered RNase inhibitor comprises at least a substitution at amino acid position 145, 228, 291, or 453, or combinations thereof, wherein the amino acid positions are relative to the reference sequence corresponding to residues 13 to 468 of SEQ ID NO: 2, or relative to the reference sequence corresponding to SEQ ID NO: 2.

[0143] In some embodiments, the amino acid sequence of the engineered RNase inhibitor comprises at least a substitution 145V, 228R, 291P, or 453R, or combinations thereof, wherein the amino acid positions are relative to the reference sequence corresponding to residues 13 to 468 of SEQ ID NO: 2, or relative to the reference sequence corresponding to SEQ ID NO: 2.

[0144] In some embodiments, the amino acid sequence of the engineered RNase inhibitor comprises at least a substitution L145V, G228R, E291P, or S453R, or combinations thereof, wherein the amino acid positions are relative to the reference sequence corresponding to residues 13 to 468 of SEQ ID NO: 2, or relative to the reference sequence corresponding to SEQ ID NO: 2.

[0145] In some embodiments, the amino acid sequence of the engineered RNase inhibitor comprises at least a substitution at amino acid position 50, 81, 90, 124, 147, 148, 203, 205, or 285, or combinations thereof, wherein the amino acid positions are relative to the reference sequence corresponding to residues 13 to 468 of SEQ ID NO: 2, or relative to the reference sequence corresponding to SEQ ID NO: 2.

[0146] In some embodiments, the amino acid sequence of the engineered RNase inhibitor comprises at least a substitution 50S, 81T, 90G, 124A, 147E, 148N, 203E, 205P, or 285Q, or combinations thereof, wherein the amino acid positions are relative to the reference sequence corresponding to residues 13 to 468 of SEQ ID NO: 2, or relative to the reference sequence corresponding to SEQ ID NO: 2.

[0147] In some embodiments, the amino acid sequence of the engineered RNase inhibitor comprises at least a substitution M50S, H81T, P90G, E124A, P147E, Q148N, D203E, A205P, or R285Q, or combinations thereof, wherein the amino acid positions are relative to the reference sequence corresponding to residues 13 to 468 of SEQ ID NO: 2, or relative to the reference sequence corresponding to SEQ ID NO: 2.

[0148] In some embodiments, the amino acid sequence of the engineered RNase inhibitor comprises at least a substitution at amino acid position 64, 107, 142, 176, 228, 319, 342, or 395, or combinations thereof, wherein the amino acid positions are relative to the reference sequence corresponding to residues 13 to 468 of SEQ ID NO: 2, or relative to the reference sequence corresponding to SEQ ID NO: 2.

[0149] In some embodiments, the amino acid sequence of the engineered RNase inhibitor comprises at least a substitution 64R, 107D, 142Q, 176S, 228L, 319G, 342M, or 395L, or combinations thereof, wherein the amino acid positions are relative to the reference sequence corresponding to residues 13 to 468 of SEQ ID NO: 2, or relative to the reference sequence corresponding to SEQ ID NO: 2.

[0150] In some embodiments, the amino acid sequence of the engineered RNase inhibitor comprises at least a substitution S64R, T107D, S142Q, K176S, R228L, A319G, S342M, or A395L, or combinations thereof, wherein the amino acid positions are relative to the reference sequence corresponding to residues 13 to 468 of SEQ ID NO: 2, or relative to the reference sequence corresponding to SEQ ID NO: 2.

[0151] In some embodiments, the amino acid sequence of the engineered RNase inhibitor comprises at least a substitution or substitution set at amino acid position(s) 257/459, 345, 257, 296, 113, 95/296/459, 95/257/296, 453, 107/267, 417/422/459, 395, 390, 257/296, 243, 156/257, 351, 348, 363, 95/257/296/422, 83/107/230/267/429, 107/429, 107/323/429, 94/121/265/390, 400, 429, or 81, wherein the amino acid positions are relative to the reference sequence corresponding to residues 13 to 468 of SEQ ID NO: 2, or relative to the reference sequence corresponding to SEQ ID NO: 2.

[0152] In some embodiments, the amino acid sequence of the engineered RNase inhibitor comprises at least a substitution or substitution set 257F/459E, 345A, 257F, 296L, 113G, 95E/296L/459E, 257V, 95Q/257F/2961, 453M, 1071/267K, 417L/422V/459E, 395L, 390S, 257G/2961, 243C, 156M/257S, 351R, 348K, 363E, 453R, 95E/257F/2961/422V, 395C, 94L/121S/332L/390T/466I, 257G/417L/419D/459E, 452R, 95E/257F/2961, 377S/390T, 453F, 452K, 272N, 243S, 126V/386G, 267H, 390G, 430L, 453L, 453A, 230L/429L, 377S/390S, 257T, 459K, 272Q, 430G, 453K, 83L/1071/230L/267T/429L, 267R, 1071/429L, 243R, 243M, 107A/323E/429L, 94L/121S/265L/390T, 400L, 453W, 351K, 429L, 257F/296I, 3951, 459M, or 81F, wherein the amino acid positions are relative to the reference sequence corresponding to residues 13 to 468 of SEQ ID NO: 2, or relative to the reference sequence corresponding to SEQ ID NO: 2.

[0153] In some embodiments, the amino acid sequence of the engineered RNase inhibitor comprises at least a substitution or substitution set R257F/G459E, T345A, R257F, M296L, P113G, R95E/M296L/G459E, R257V, R95Q/R257F/M296I, S453M, T107I/V267K, M417L/1422V/G459E, A395L, A390S, R257G/M296I, D243C, V156M/R257S, V351R, T348K, C363E, S453R, R95E/R257F/M296I/1422V, A395C, 194L/T121S/F332L/A390T/V466I, R257G/M417L/E419D/G459E, N452R, R95E/R257F/M296I, A377S/A390T, S453F, N452K, D272N, D243S, Y126V/D386G, V267H, A390G, E430L, S453L, S453A, V230L/V429L, A377S/A390S, R257T, G459K, D272Q, E430G, S453K, V83L/T107I/V230L/V267T/V429L, V267R, T107I/V429L, D243R, D243M, T107A/Q323E/V429L, 194L/T121S/1265L/A390T, V400L, S453W, V351K, V429L, R257F/M296I, A395I, G459M, or H81F, wherein the amino acid positions are relative to the reference sequence corresponding to residues 13 to 468 of SEQ ID NO: 2, or relative to the reference sequence corresponding to SEQ ID NO: 2.

[0154] In some embodiments, the amino acid sequence of the engineered RNase inhibitor comprises at least a substitution set at amino acid positions 95/296/323/390/429/459, 95/257/296/323/429/459, 95/257/296/390/459, 95/257/296/323/390/459, 95/257/296/323/390/429/459, 95/257/296/429/459, 95/257/296/377/390/459, 95/135/257/296/323/377/390/459, 95/296/323/377/390/429/459, 95/257/296/323/390/459, 95/257/296/323/377/390/459, 95/257/296/377/429/459, 95/158/257/296/323/377/390/459, 95/257/296/323/377/429/459, 95/167/257/296/323/390/429/459, 95/296/377/390/429/459, 95/296/377/390/459, 95/257/296/323/377/390/429/459, 95/257/296/377/459, 95/296/390/429/459, 95/257/296/377/390/429/459, 95/257/296/390/429/459, or 95/296/390/459, wherein the amino acid positions are relative to the reference sequence corresponding to residues 13 to 468 of SEQ ID NO: 2, or relative to the reference sequence corresponding to SEQ ID NO: 2. In some embodiments, the amino acid sequence of the engineered RNase inhibitor comprises at least a substitution or substitution set of an even numbered SEQ ID NO. of SEQ ID NOs: 144-222 set forth in the Appendix, wherein the amino acid positions are relative to the reference sequence corresponding to residues 13 to 468 of SEQ ID NO: 2, or relative to the reference sequence corresponding to SEQ ID NO: 2.

[0155] In some embodiments, the amino acid sequence of the engineered RNase inhibitor comprises at least a substitution set at amino acid positions 95/243/296/363/390/459, 95/113/257/296/351/363/429/459, 95/113/257/296/351/390/430/459, 95/113/257/272/296/390/459, 95/113/243/296/351/390/429/459, 95/257/272/296/345/348/459, 95/243/257/296/351/390/459, 95/113/243/257/272/296/390/459, 95/257/272/296/363/390/430/459, 95/257/296/351/390/459, 95/113/243/296/390/430/459, 95/113/257/267/296/351/363/400/430/459, 95/113/243/257/296/351/430/459, 95/243/267/296/341/390/395/459, 95/113/243/257/296/345/348/459, 95/113/243/257/296/348/390/459, 95/243/296/345/348/390/459, 95/113/243/257/296/345/430/459, 95/257/296/345/348/351/390/429/430/459, 95/272/296/345/390/429/430/459, 95/243/267/296/351/459, 95/243/272/296/345/390/459, 95/113/257/296/363/390/459, 95/243/296/390/429/459, 95/113/243/257/296/351/390/459, 95/113/243/272/296/345/348/430/459, 95/243/267/272/296/348/390/459, 95/113/257/272/296/345/348/363/430/459, 95/113/243/296/390/429/430/459, 95/113/243/257/272/296/351/363/459, 95/243/272/296/345/348/363/390/395/459, 95/113/243/272/296/351/363/390/395/459, 95/113/243/257/272/296/345/390/430/459, 95/113/243/267/272/296/363/390/430/459, 95/113/243/267/296/348/363/430/459, 95/113/243/257/296/351/390/430/459, 95/113/243/257/272/296/351/390/459, 95/113/243/267/296/390/430/459, 95/243/257/296/348/395/430/459, 95/243/296/345/348/429/430/459, 95/243/257/296/345/348/395/459, 95/243/257/272/296/351/400/429/459, 95/113/243/267/296/459, 95/243/267/296/351/459, 95/113/296/390/430/459, 95/243/267/296/351/400/459, or 95/296/429/430/459, wherein the amino acid positions are relative to the reference sequence corresponding to residues 13 to 468 of SEQ ID NO: 2, or relative to the reference sequence corresponding to SEQ ID NO: 2. In some embodiments, the amino acid sequence of the engineered RNase inhibitor comprises at least a substitution or substitution set of an even numbered SEQ ID NO. of SEQ ID NOs: 224-316 set forth in the Appendix, wherein the amino acid positions are relative to the reference sequence corresponding to residues 13 to 468 of SEQ ID NO: 2, or relative to the reference sequence corresponding to SEQ ID NO: 2.

[0156] In some embodiments, the amino acid sequence of the engineered RNase inhibitor comprises at least a substitution set at amino acid positions 95/113/243/257/272/296/323/390/453/459, 95/113/243/257/272/296/323/348/390/452/459, 95/113/243/257/272/296/390/452/453/459, 95/113/243/257/272/296/323/351/390/430/452/453/459, 95/113/243/257/272/291/296/390/459, 95/113/145/243/257/272/296/390/459, 95/113/243/257/272/296/323/390/429/459, 38/95/113/243/257/272/296/390/459, 95/113/150/243/257/272/296/390/459, 95/113/228/243/257/272/296/390/459, 12/95/113/243/257/272/296/390/459, 95/113/173/243/257/272/296/390/459, 38/95/113/237/243/257/272/296/390/459, 40/95/113/243/257/272/296/390/459, or 38/95/113/243/257/272/296/390/459, wherein the amino acid positions are relative to the reference sequence corresponding to residues 13 to 468 of SEQ ID NO: 2, or relative to the reference sequence corresponding to SEQ ID NO: 2. In some embodiments, the amino acid sequence of the engineered RNase inhibitor comprises at least a substitution or substitution set of an even numbered SEQ ID NO. of SEQ ID NOs: 318-352 set forth in the Appendix, wherein the amino acid positions are relative to the reference sequence corresponding to residues 13 to 468 of SEQ ID NO: 2, or relative to the reference sequence corresponding to SEQ ID NO: 2.

[0157] In some embodiments, the amino acid sequence of the engineered RNase inhibitor comprises at least a substitution set at amino acid positions 13/95/113/145/228/243/257/272/291/296/323/351/390/452/459, 95/113/243/257/272/296/323/348/390/452/453/459, Dec. 13, 1995/113/243/257/272/296/323/348/390/452/453/459, 95/113/145/228/243/257/272/291/296/323/348/390/452/453/459, 13/95/113/145/243/257/272/296/323/348/390/452/453/459, 95/113/145/228/243/257/272/291/296/323/348/390/452/453/459, 95/113/145/243/257/272/291/296/323/348/390/452/453/459, 38/95/113/145/243/257/272/296/323/348/390/452/453/459, 12/95/113/145/243/257/272/296/323/348/390/452/453/459, 38/95/113/145/228/243/257/272/296/323/348/390/452/453/459, 15/28/81/95/113/124/221/243/257/272/285/296/317/323/348/390/452/459, 15/28/64/95/113/203/221/243/257/272/285/296/317/323/348/390/452/459, 15/57/81/95/113/124/148/203/243/257/272/296/323/348/390/452/459, 12/95/113/243/257/272/296/323/348/390/452/453/459, 56/57/64/81/91/95/113/124/203/243/257/272/285/296/317/323/348/390/452/459, 66/90/95/113/142/176/205/243/257/272/296/319/323/348/390/452/459, 95/113/228/243/257/272/296/323/348/390/452/453/459, or 95/113/145/228/243/257/272/296/323/348/390/452/453/459, wherein the amino acid positions are relative to the reference sequence corresponding to residues 13 to 468 of SEQ ID NO: 2, or relative to the reference sequence corresponding to SEQ ID NO: 2. In some embodiments, the amino acid sequence of the engineered RNase inhibitor comprises at least a substitution or substitution set of an even numbered SEQ ID NO. of SEQ ID NOs: 354-390 set forth in the Appendix, wherein the amino acid positions are relative to the reference sequence corresponding to residues 13 to 468 of SEQ ID NO: 2, or relative to the reference sequence corresponding to SEQ ID NO: 2.

[0158] In some embodiments, the amino acid sequence of the engineered RNase inhibitor comprises at least a substitution set at amino acid positions 95/113/145/228/243/257/272/291/296/319/323/348/390/452/453/459, 37/95/113/145/228/243/257/272/291/296/323/348/390/452/453/459, 60/95/113/145/228/243/257/272/291/296/323/348/390/452/453/459, 95/113/145/228/243/257/272/291/296/323/342/348/390/452/453/459, 81/95/113/145/228/243/257/272/291/296/323/348/390/452/453/459, 50/95/113/145/228/243/257/272/291/296/323/348/390/452/453/459, 95/113/145/228/243/257/272/291/296/323/348/390/395/452/453/459, 64/95/113/145/228/243/257/272/291/296/323/348/390/452/453/459, 95/113/145/177/228/243/257/272/291/296/323/348/390/452/453/459, 95/107/113/145/228/243/257/272/291/296/323/348/390/452/453/459, 50/95/113/145/228/243/257/272/291/296/323/348/390/452/453/459, 37/95/113/145/228/243/257/272/291/296/323/348/390/452/453/459, 95/113/145/228/243/257/272/291/296/323/348/373/390/452/453/459, 95/113/145/228/243/257/272/291/296/319/323/348/390/452/453/459, 95/113/145/205/228/243/257/272/291/296/323/348/390/452/453/459, 35/95/113/145/228/243/257/272/291/296/323/348/390/452/453/459, 78/95/113/145/228/243/257/272/291/296/323/348/390/452/453/459, 95/113/145/228/243/257/272/291/296/323/348/390/452/453/459, 95/113/145/178/228/243/257/272/291/296/323/348/390/452/453/459, or 95/113/145/228/243/257/272/285/291/296/323/348/390/452/453/459, wherein the amino acid positions are relative to the reference sequence corresponding to residues 13 to 468 of SEQ ID NO: 2, or relative to the reference sequence corresponding to SEQ ID NO: 2. In some embodiments, the amino acid sequence of the engineered RNase inhibitor comprises at least a substitution or substitution set of an even numbered SEQ ID NO. of SEQ ID NOs: 392-438 set forth in the Appendix, wherein the amino acid positions are relative to the reference sequence corresponding to residues 13 to 468 of SEQ ID NO: 2, or relative to the reference sequence corresponding to SEQ ID NO: 2.

[0159] In some embodiments, the amino acid sequence of the engineered RNase inhibitor comprises at least a substitution set at amino acid positions 37/95/113/142/145/148/203/205/228/243/257/272/285/291/296/319/323/348/390/452/453/459, 50/81/90/95/113/124/145/147/148/203/205/228/243/257/272/285/291/296/323/348/390/452/453/459, 66/90/95/113/145/148/228/243/257/272/285/291/296/317/319/323/348/390/452/453/459, 28/37/91/95/113/142/145/205/228/243/257/272/285/291/296/323/348/390/452/453/459, 50/91/95/113/124/142/145/147/148/203/205/228/243/257/272/291/296/317/319/323/348/390/452/453/459, 50/66/90/91/95/113/124/142/145/228/243/257/272/285/291/296/317/323/348/390/452/453/459, 95/113/145/147/148/203/228/243/257/272/285/291/296/317/319/323/348/390/452/453/459, 50/66/81/90/95/113/145/205/228/243/257/272/291/296/319/323/348/390/452/453/459, 50/66/95/113/124/145/203/205/228/243/257/272/291/296/317/319/323/348/390/452/453/459, 28/66/84/90/91/95/113/142/145/205/228/243/257/272/291/296/319/323/348/390/452/453/459, 37/91/95/113/145/148/205/228/243/257/272/291/296/319/323/348/390/452/453/459, 28/66/81/95/113/124/145/147/228/243/257/272/285/291/296/319/323/348/390/452/453/459, 28/50/66/84/90/95/113/145/147/203/205/228/243/257/272/291/296/317/323/348/390/452/453/459, 28/50/90/91/95/113/124/142/145/228/243/257/272/291/296/319/323/348/390/452/453/459, 37/81/95/113/145/147/148/203/205/228/243/257/272/291/296/323/348/390/452/453/459, 28/66/81/90/91/95/113/124/145/203/228/243/257/272/285/291/296/317/319/323/348/390/452/453/459, 28/50/66/81/90/91/95/113/138/145/147/148/205/228/243/257/272/285/291/296/319/323/348/390/452/453/459, 28/37/50/95/113/124/145/228/243/257/272/291/296/319/323/348/390/452/453/459, 81/90/91/95/113/124/145/228/243/257/272/285/291/296/317/323/348/390/452/453/459, 50/90/95/113/142/145/203/228/243/257/272/285/291/296/323/348/390/452/453/459, 50/90/95/113/124/142/145/205/228/243/257/272/285/291/296/319/323/348/390/452/453/459, 28/66/90/91/95/113/145/147/148/205/228/243/257/272/291/296/319/323/326/348/390/452/453/459, 66/81/95/113/145/228/243/257/272/291/296/319/323/348/390/452/453/459, 28/66/90/95/113/145/203/205/228/243/257/272/291/296/319/323/348/390/452/453/459, 50/66/90/91/95/113/145/205/228/243/257/272/291/296/323/348/390/452/453/459, 50/66/95/113/145/147/205/228/243/257/272/291/296/323/348/390/452/453/459, 37/81/95/113/145/228/243/257/272/285/291/296/323/348/390/452/453/459, 50/66/90/91/95/113/145/228/243/257/272/291/296/319/323/348/390/452/453/459, 50/95/113/145/147/203/228/243/257/272/285/291/296/323/348/390/452/453/459, 37/50/81/95/113/145/148/228/243/257/272/291/296/323/348/390/452/453/459, 28/66/95/113/142/145/228/243/257/272/291/296/319/323/348/390/452/453/459, 15/28/66/81/90/91/95/113/145/147/148/228/243/257/272/291/296/319/323/348/390/452/453/459, 15/28/81/90/91/95/113/142/145/228/243/257/272/285/291/296/317/319/323/348/390/452/453/459, 15/28/37/50/66/95/113/124/145/147/148/205/228/243/257/272/285/291/296/323/348/390/452/453/459, 15/66/81/95/113/145/147/148/228/243/257/272/291/296/323/348/390/452/453/459, 66/91/95/113/124/142/145/147/148/228/243/257/272/291/296/323/348/390/452/453/459, 15/37/66/81/95/113/145/147/148/228/243/257/272/291/296/317/319/323/348/390/452/453/459, 15/50/90/91/95/113/124/142/145/147/228/243/257/272/285/291/296/317/319/323/348/390/452/453/459, 15/50/90/91/95/113/142/145/147/148/203/205/228/243/257/272/291/296/323/348/390/452/453/459, 15/28/81/95/113/142/145/147/148/228/243/257/272/285/291/296/317/319/323/348/390/452/453/459, 15/28/50/66/90/91/95/113/145/203/228/243/257/272/285/291/296/319/323/348/390/452/453/459, 15/66/90/91/95/113/145/147/148/205/228/243/257/272/285/291/296/323/348/390/452/453/459, 15/28/90/91/95/113/142/145/147/148/228/243/257/272/285/291/296/317/319/323/348/390/452/453/459, 15/37/91/95/113/145/148/228/243/257/272/285/291/296/319/323/348/390/452/453/459, 81/95/113/145/147/148/203/205/228/243/257/272/291/296/323/348/390/452/453/459, 95/113/145/147/148/228/243/257/272/285/291/296/319/323/348/390/452/453/459, 15/50/90/95/113/145/147/148/228/243/257/272/291/296/323/348/390/452/453/459, 15/66/81/90/95/113/145/228/243/257/272/285/291/296/319/323/348/390/452/453/459, 50/81/95/113/145/147/148/228/243/257/272/285/291/296/323/348/390/452/453/459, 37/95/113/145/147/148/228/243/257/272/285/291/296/323/348/390/452/453/459, 15/37/66/84/90/91/95/113/145/203/228/243/257/272/285/291/296/317/323/348/390/452/453/459, 15/84/90/91/95/113/145/203/228/243/257/272/285/291/296/323/348/390/452/453/459, 37/90/91/95/113/145/147/228/243/257/272/291/296/323/348/390/452/453/459, 90/91/95/113/145/205/228/243/257/272/291/296/317/319/323/348/390/452/453/459, 50/95/113/145/148/203/228/243/257/272/291/296/317/323/348/390/452/453/459, 15/28/50/66/81/84/90/95/113/145/228/243/257/272/285/291/296/317/323/348/390/452/453/459, 15/81/95/113/145/147/228/243/257/272/291/296/323/348/390/452/453/459, or 15/95/113/145/228/243/257/272/285/291/296/323/348/390/452/453/459, wherein the amino acid positions are relative to the reference sequence corresponding to residues 13 to 468 of SEQ ID NO: 2, or relative to the reference sequence corresponding to SEQ ID NO: 2. In some embodiments, the amino acid sequence of the engineered RNase inhibitor comprises at least a substitution or substitution set of an even numbered SEQ ID NO. of SEQ ID NOs: 440-554 set forth in the Appendix, wherein the amino acid positions are relative to the reference sequence corresponding to residues 13 to 468 of SEQ ID NO: 2, or relative to the reference sequence corresponding to SEQ ID NO: 2.

[0160] In some embodiments, the amino acid sequence of the engineered RNase inhibitor comprises at least a substitution set at amino acid positions 37/50/60/81/90/95/113/124/142/145/147/148/176/203/205/228/243/257/272/285/291/296/317/323/348/390/452/453/459, 50/60/64/81/90/95/113/124/145/147/148/203/205/228/243/257/272/285/291/296/317/319/323/342/348/390/452/453/459, 50/66/81/90/95/113/124/145/147/148/203/205/228/243/257/272/285/291/296/319/323/342/348/390/395/45 2/453/459, 37/50/81/90/95/113/124/142/145/147/148/203/205/228/243/257/272/285/291/296/317/323/348/390/452/45 3/459, 50/64/81/90/95/107/113/124/142/145/147/148/203/205/228/243/257/272/285/291/296/319/323/342/348/39 0/395/452/453/459, 37/50/60/81/90/95/113/124/145/147/148/203/205/228/243/257/272/285/291/296/317/319/323/342/348/390/395/452/453/459, 37/50/60/81/90/95/107/113/124/142/145/147/148/176/203/205/228/243/257/272/285/291/296/317/319/323/342/348/390/452/453/459, 50/81/90/95/113/124/142/145/147/148/203/205/228/243/257/272/285/291/296/317/319/323/342/348/390/3 95/452/453/459, 50/81/90/95/113/124/145/147/148/176/203/205/228/243/257/272/285/291/296/319/323/348/390/395/452/4 53/459, 50/81/90/95/113/124/145/147/148/203/205/228/243/257/272/285/291/296/323/342/348/390/395/452/453/4 59, 50/64/81/90/95/113/124/145/147/148/203/205/228/243/257/272/285/291/296/323/348/390/395/452/453/45 9.

[0161] 50/64/81/90/95/107/113/124/142/145/147/148/176/203/205/228/243/257/272/285/291/296/319/323/342/34 8/390/395/452/453/459, 50/81/90/95/113/124/145/147/148/203/205/228/243/257/272/285/291/296/323/348/390/395/452/453/459, 50/60/64/81/90/95/107/113/124/142/145/147/148/203/205/228/243/257/272/285/291/296/319/323/342/348/390/452/453/459, 37/50/66/81/90/95/107/113/124/145/147/148/203/205/228/243/257/272/285/291/296/317/323/348/390/452/453/459, 37/50/66/81/90/95/107/113/124/145/147/148/203/205/228/243/257/272/285/291/296/317/323/348/390/395/452/453/459, 37/50/81/90/95/113/124/145/147/148/203/205/228/243/257/272/285/291/296/317/323/348/390/395/452/45 3/459.

[0162] 50/66/81/90/95/113/124/142/145/147/148/203/205/228/243/257/272/285/291/296/319/323/342/348/390/39 5/452/453/459, 50/66/81/90/95/113/124/142/145/147/148/203/205/228/243/257/272/285/291/296/323/348/390/395/452/45 3/459, 50/81/90/95/113/124/145/147/148/203/205/228/243/257/272/285/291/296/323/348/363/390/452/453/459, 50/81/90/95/113/124/142/145/147/148/203/205/228/243/257/272/285/291/296/323/348/390/395/452/453/4 59, 50/60/64/81/90/95/113/124/145/147/148/177/203/205/228/243/257/272/285/291/296/323/348/390/395/452/453/459, 50/66/81/90/95/113/124/145/147/148/203/205/228/243/257/272/285/291/296/319/323/348/390/452/453/45 9, 50/64/81/90/95/107/113/124/145/147/148/177/203/205/228/243/257/272/285/291/296/317/323/348/390/39 5/452/453/459, 50/64/81/90/95/113/124/142/145/147/148/177/203/205/228/243/257/272/285/291/296/317/323/348/390/45 2/453/459, 37/50/81/90/95/113/124/145/147/148/203/205/228/243/257/272/285/291/296/323/348/390/452/453/459, 50/81/90/95/113/124/145/147/148/203/205/228/243/257/260/272/285/291/296/323/348/390/452/453/459, 50/60/81/90/95/113/124/145/147/148/203/205/228/243/257/272/285/291/296/317/323/348/390/395/452/45 3/459, 50/60/64/81/90/95/113/124/145/147/148/176/203/205/228/243/257/272/285/291/296/317/323/342/348/390/452/453/459, 50/81/90/95/113/124/145/147/148/177/203/205/228/243/257/272/285/291/296/323/342/348/390/395/452/4 53/459, 50/64/81/90/95/113/124/142/145/147/148/177/203/205/228/243/257/272/285/291/296/317/319/323/348/39 0/452/453/459, 50/60/64/81/90/95/107/113/124/145/147/148/203/205/228/243/257/272/285/291/296/323/342/348/390/452/453/459, 50/60/81/90/95/107/113/124/142/145/147/148/203/205/228/243/257/272/285/291/296/317/323/342/348/39 0/395/452/453/459, 50/66/81/90/95/113/124/145/147/148/203/205/228/243/257/272/285/291/296/319/323/348/390/452/453/45 9, 50/64/81/90/95/113/124/145/147/148/203/205/228/243/257/272/285/291/296/317/319/323/348/390/452/45 3/459, 50/81/90/95/113/124/145/147/148/168/203/205/228/243/257/272/285/291/296/323/348/390/452/453/459, 50/81/90/95/113/124/145/147/148/203/205/228/243/257/272/285/291/296/319/323/348/390/395/452/453/4 59, 37/50/81/90/95/107/113/124/145/147/148/203/205/228/243/257/272/285/291/296/323/348/390/452/453/45 9, 50/66/81/90/95/113/124/142/145/147/148/203/205/228/243/257/272/285/291/296/323/348/390/452/453/45 9, 37/50/81/90/95/113/124/145/147/148/203/205/228/243/257/272/285/291/296/323/342/348/390/452/453/45 9, 50/60/64/81/90/95/113/124/145/147/148/176/203/205/228/243/257/272/285/291/296/323/348/390/395/452/453/459, 50/60/64/81/90/95/113/124/145/147/148/203/205/228/243/257/272/285/291/296/323/342/348/390/452/453/459, 35/50/81/90/95/113/124/145/147/148/203/205/228/243/257/272/285/291/296/323/348/390/452/453/459, 50/60/66/81/90/95/113/124/145/147/148/203/205/228/243/257/272/285/291/296/323/348/390/395/452/453/459, 50/81/90/95/113/124/145/147/148/203/205/228/243/257/272/285/291/296/319/323/348/390/452/453/459, 50/81/90/95/113/124/145/147/148/203/205/228/243/257/272/285/291/296/317/319/323/342/348/390/395/4 52/453/459, or 37/50/81/90/95/113/124/145/147/148/177/203/205/228/243/257/272/285/291/296/323/348/390/452/453/45 9, 50/81/90/95/107/113/124/145/147/148/203/205/228/243/257/272/285/291/296/323/348/390/452/453/459, 37/50/81/90/95/113/124/145/147/148/203/205/228/243/257/272/285/291/296/323/348/390/452/453/459, 37/50/60/64/81/90/95/113/124/142/145/147/148/203/205/228/243/257/272/285/291/296/323/348/390/452/453/459, 37/50/60/81/90/95/113/124/142/145/147/148/203/205/228/243/257/272/285/291/296/323/348/390/452/453/459, 50/60/81/90/95/113/124/145/147/148/203/205/228/243/257/272/285/291/296/319/323/342/348/390/452/45 3/459, or 50/66/81/90/95/113/124/145/147/148/176/203/205/228/243/257/272/285/291/296/317/319/323/348/390/39 5/452/453/459, wherein the amino acid positions are relative to the reference sequence corresponding to residues 13 to 468 of SEQ ID NO: 2, or relative to the reference sequence corresponding to SEQ ID NO: 2. In some embodiments, the amino acid sequence of the engineered RNase inhibitor comprises at least a substitution or substitution set of an even numbered SEQ ID NO. of SEQ ID NOs: 556-666 set forth in the Appendix, wherein the amino acid positions are relative to the reference sequence corresponding to residues 13 to 468 of SEQ ID NO: 2, or relative to the reference sequence corresponding to SEQ ID NO: 2.

[0163] In some embodiments, the amino acid sequence of the engineered RNase inhibitor comprises at least a substitution set at amino acid positions 50/78/81/90/95/113/124/145/147/148/203/205/228/243/257/260/272/285/291/296/323/348/390/452/453/45 9, 50/81/90/95/113/124/145/147/148/203/205/228/243/257/272/285/291/296/323/348/390/396/452/453/459, 50/81/90/95/113/124/145/147/148/203/205/228/243/257/272/285/291/296/323/345/348/390/452/453/459, 37/50/81/90/95/113/124/145/147/148/203/205/228/243/257/272/285/291/296/323/348/390/452/453/459, 50/81/90/95/113/124/145/147/148/203/205/228/243/257/272/285/291/296/323/342/348/390/452/453/459, 50/81/90/95/113/124/145/147/148/203/205/228/243/257/272/285/291/296/323/348/390/395/452/453/459, 50/81/90/95/113/124/145/147/148/203/205/228/243/257/272/285/291/296/323/348/367/390/452/453/459, 38/50/81/90/95/113/124/145/147/148/203/205/228/243/257/272/285/291/296/323/348/390/452/453/459, 50/81/90/95/107/113/124/145/147/148/203/205/228/243/257/272/285/291/296/323/348/390/452/453/459, 50/81/90/95/113/124/145/147/148/203/205/228/243/257/272/285/291/296/323/348/390/452/453/459, 50/81/90/95/113/124/145/147/148/203/205/228/243/257/260/272/285/291/296/323/348/390/452/453/459, 50/57/81/90/95/113/124/145/147/148/203/205/228/243/257/272/285/291/296/323/348/390/452/453/459, 51/81/90/95/113/124/145/147/148/203/205/228/243/257/272/285/291/296/323/348/390/452/453/459, 50/81/90/95/113/124/145/147/148/203/205/228/243/257/272/285/291/296/323/338/348/390/452/453/459, 50/81/90/95/113/124/145/147/148/203/205/228/243/257/272/296/323/348/385/390/452/453/459, 50/81/90/95/113/124/145/147/148/175/203/205/228/243/257/272/285/291/296/323/348/390/452/453/459, 50/60/81/90/95/113/124/145/147/148/203/205/228/243/257/272/285/291/296/323/348/390/452/453/459, 50/81/90/95/113/124/145/203/205/228/243/257/272/285/291/296/323/348/390/452/453/459, 50/60/81/90/95/113/124/145/147/148/203/205/228/243/257/272/285/291/296/323/348/390/452/453/459, 50/81/90/95/113/124/145/147/148/177/203/205/228/243/257/272/285/291/296/323/348/390/452/453/459, 28/50/81/90/95/113/124/145/147/148/203/205/228/243/257/272/285/291/296/323/348/390/452/453/459, 50/81/90/95/113/118/124/145/147/148/203/205/228/243/257/272/285/291/296/323/348/390/452/453/459, or 50/64/81/90/95/113/124/145/147/148/203/205/228/243/257/272/285/291/296/323/348/390/452/453/459, wherein the amino acid positions are relative to the reference sequence corresponding to residues 13 to 468 of SEQ ID NO: 2, or relative to the reference sequence corresponding to SEQ ID NO: 2. In some embodiments, the amino acid sequence of the engineered RNase inhibitor comprises at least a substitution or substitution set of an even numbered SEQ ID NO. of SEQ ID NOs: 668-724 set forth in the Appendix, wherein the amino acid positions are relative to the reference sequence corresponding to residues 13 to 468 of SEQ ID NO: 2, or relative to the reference sequence corresponding to SEQ ID NO: 2.

[0164] In some embodiments, the amino acid sequence of the engineered RNase inhibitor comprises at least a substitution set at amino acid positions 28/50/64/81/90/95/107/113/118/124/142/145/147/148/175/176/203/205/228/243/257/260/272/285/291/296/319/323/338/342/348/367/390/395/452/453/459, 50/64/81/90/95/107/113/118/124/142/145/147/148/168/176/203/205/228/243/257/260/272/285/291/296/31 9/323/342/348/390/395/396/452/453/459, 38/50/60/64/81/90/95/107/113/124/142/145/147/148/168/176/203/205/228/243/257/260/272/285/291/296/319/323/338/342/348/367/390/395/452/453/459, 28/38/50/57/60/64/81/90/95/107/113/124/142/145/147/148/176/203/205/228/243/257/260/272/285/291/29 6/319/323/342/348/363/367/390/395/452/453/459, 50/57/64/81/90/95/107/113/118/124/142/145/147/148/176/203/205/228/243/257/260/272/285/291/296/319/323/338/342/348/367/390/395/452/453/459, 50/57/64/81/90/95/107/113/118/124/142/145/147/148/168/176/177/203/205/228/243/257/260/272/285/291/296/319/323/338/342/348/367/390/395/452/453/459, 50/64/81/90/95/107/113/124/142/145/147/148/176/203/205/228/243/257/260/272/285/291/296/319/323/34 2/348/390/395/396/452/453/459, 28/50/64/81/90/95/107/113/118/124/142/145/147/148/168/176/203/205/228/243/257/260/272/285/291/296/319/323/342/348/367/390/395/396/452/453/459, 28/50/64/81/90/95/107/113/124/142/145/147/148/176/203/205/228/243/257/260/272/285/291/296/319/323/338/342/348/390/395/452/453/459, 28/50/60/64/81/90/95/107/113/124/142/145/147/148/168/176/203/205/228/243/257/260/272/285/291/296/319/323/342/348/390/395/452/453/459, 50/57/60/64/81/90/95/107/113/118/124/142/145/147/148/175/176/177/203/205/228/243/257/260/272/285/291/296/319/323/338/342/348/390/395/452/453/459, 28/50/57/64/81/90/95/107/113/124/142/145/147/148/176/203/205/228/243/257/260/272/285/291/296/319/323/338/342/348/367/390/395/452/453/459, 35/50/64/81/90/95/107/113/124/142/145/147/148/176/203/205/228/243/257/260/272/285/291/296/319/323/338/342/348/367/390/395/452/453/459, 50/64/81/90/95/107/113/118/124/142/145/147/148/175/176/203/205/228/243/257/260/272/285/291/296/31 9/323/338/342/348/390/395/452/453/459, 50/64/81/90/95/107/113/124/142/145/147/148/168/176/203/205/228/243/257/260/272/285/291/296/319/32 3/342/348/390/395/452/453/459, 50/57/60/64/81/90/95/107/113/124/142/145/147/148/168/176/177/203/205/228/243/257/260/272/285/291/296/319/323/338/342/348/367/390/395/452/453/459, 28/50/64/81/90/95/107/113/124/142/145/147/148/168/176/203/205/228/243/257/260/272/285/291/296/319/323/338/342/348/390/395/452/453/459, 50/64/81/90/95/107/113/124/142/145/147/148/176/203/205/228/243/257/260/272/285/291/296/319/323/34 2/348/367/390/395/452/453/459, 28/50/57/64/81/90/95/107/113/124/137/142/145/147/148/176/203/205/228/243/257/260/272/285/291/296/319/323/342/348/390/395/452/453/459, 38/50/60/64/81/90/95/107/113/124/142/145/147/148/175/176/203/205/228/243/257/260/272/285/291/296/319/323/338/342/348/390/395/452/453/459, 38/50/60/64/81/90/95/107/113/124/142/145/147/148/176/203/205/228/243/257/260/272/285/291/296/319/323/342/348/367/390/395/396/452/453/459, 50/57/60/64/81/90/95/107/113/124/142/145/147/148/176/203/205/228/243/257/260/272/285/291/296/319/323/342/348/363/367/390/395/452/453/459, 50/60/64/81/90/95/107/113/124/142/145/147/148/176/203/205/228/243/257/260/272/285/291/296/319/323/342/348/367/390/395/452/453/459, 28/38/50/60/64/81/90/95/107/113/124/142/145/147/148/176/203/205/228/243/257/260/272/285/291/296/3 19/323/342/348/367/390/395/452/453/459, 50/60/64/81/90/95/107/113/124/142/145/147/148/168/176/203/205/228/243/257/272/285/291/296/319/323/342/348/390/395/452/453/459, 50/64/81/90/95/107/113/124/142/145/147/148/176/203/205/228/243/257/260/272/285/291/296/319/323/34 2/348/363/367/390/395/452/453/459, 50/64/81/90/95/107/113/124/142/145/147/148/176/177/203/205/228/243/257/260/272/285/291/296/319/32 3/342/348/363/367/390/395/452/453/459, 38/50/64/81/90/95/107/113/124/142/145/147/148/176/203/205/228/243/257/260/272/285/291/296/319/323/342/348/390/395/452/453/459, 28/50/60/64/81/90/95/107/113/118/124/142/145/147/148/176/177/203/205/228/243/257/260/272/285/291/296/319/323/342/348/390/395/452/453/459, 28/35/50/60/64/81/90/95/107/113/118/124/142/145/147/148/175/176/203/205/228/243/257/260/272/285/2 91/296/319/323/342/348/390/395/452/453/459, 50/60/64/81/90/95/107/113/124/142/145/147/148/176/203/205/228/243/257/272/285/291/296/319/323/342/348/367/390/395/452/453/459, 28/50/60/64/81/90/95/107/113/118/124/142/145/147/148/176/203/205/228/243/257/272/285/291/296/319/323/342/348/390/395/452/453/459, or 50/57/64/81/90/95/107/113/118/124/142/145/147/148/176/203/205/228/243/257/272/285/291/296/319/323/342/348/390/395/452/453/459, wherein the amino acid positions are relative to the reference sequence corresponding to residues 13 to 468 of SEQ ID NO: 2, or relative to the reference sequence corresponding to SEQ ID NO: 2. In some embodiments, the amino acid sequence of the engineered RNase inhibitor comprises at least a substitution or substitution set of an even numbered SEQ ID NO. of SEQ ID NOs: 726-790 set forth in the Appendix, wherein the amino acid positions are relative to the reference sequence corresponding to residues 13 to 468 of SEQ ID NO: 2, or relative to the reference sequence corresponding to SEQ ID NO: 2.

[0165] In some embodiments, the amino acid sequence of the engineered RNase inhibitor comprises at least a substitution set at amino acid positions 50/64/81/90/95/107/113/118/124/142/145/147/148/176/203/205/228/243/257/260/272/285/291/296/319/32 3/338/342/348/390/395/396/452/453/459, 28/38/50/57/60/64/81/90/95/107/113/118/124/142/145/147/148/176/177/203/205/228/243/257/260/272/28 5/291/296/319/323/338/342/348/363/367/390/395/396/452/453/459, 28/38/50/60/64/81/90/95/107/113/124/142/145/147/148/176/203/205/228/243/257/260/272/285/291/296/3 19/323/342/348/363/367/390/395/452/453/459, 28/35/38/50/57/64/81/90/95/107/113/118/124/142/145/147/148/176/203/205/228/243/257/260/272/285/29 1/296/319/323/342/348/363/367/390/395/452/453/459, 28/50/57/60/64/81/90/95/107/113/124/142/145/147/148/168/176/203/205/228/243/257/260/272/285/291/2 96/319/323/342/348/367/390/395/452/453/459, 50/64/81/90/95/107/113/124/142/145/147/148/168/175/176/203/205/228/243/257/260/272/285/291/296/31 9/323/338/342/348/367/390/395/452/453/459, 50/57/60/64/81/90/95/107/113/124/142/145/147/148/168/176/203/205/228/243/257/260/272/285/291/296/319/323/338/342/348/363/367/390/395/396/452/453/459, 50/60/64/81/90/95/107/113/124/142/145/147/148/168/176/203/205/228/243/257/272/285/291/296/319/323/342/348/363/367/390/395/396/452/453/459, 28/38/50/57/60/64/81/90/95/107/113/118/124/142/145/147/148/168/176/203/205/228/243/257/260/272/28 5/291/296/319/323/342/348/367/390/395/452/453/459, 28/50/64/81/90/95/107/113/124/142/145/147/148/175/176/203/205/228/243/257/260/272/285/291/296/319/323/342/348/367/390/395/452/453/459, 50/60/64/81/90/95/107/113/124/142/145/147/148/176/203/205/228/243/257/272/285/291/296/319/323/342/348/363/367/390/395/396/452/453/459, 50/64/81/90/95/107/113/124/142/145/147/148/176/203/205/228/243/257/260/272/285/291/296/319/323/33 8/342/348/367/390/395/452/453/459, 28/50/57/64/81/90/95/107/113/124/142/145/147/148/176/203/205/228/243/257/260/272/285/291/296/319/323/338/342/348/363/367/390/395/452/453/459, 50/64/81/90/95/107/113/124/142/145/147/148/168/176/203/205/228/243/257/260/272/285/291/296/319/32 3/342/348/367/390/395/452/453/459, 50/64/81/90/95/107/113/124/142/145/147/148/176/203/205/228/243/257/272/285/291/296/319/323/342/34 8/367/390/395/396/452/453/459, 28/35/50/64/81/90/95/107/113/124/142/145/147/148/175/176/203/205/228/243/257/260/272/285/291/296/319/323/342/348/367/390/395/396/452/453/459, or 50/57/60/64/81/90/95/107/113/124/142/145/147/148/168/176/203/205/228/243/257/260/272/285/291/296/319/323/342/348/367/390/395/452/453/459, wherein the amino acid positions are relative to the reference sequence corresponding to residues 13 to 468 of SEQ ID NO: 2, or relative to the reference sequence corresponding to SEQ ID NO: 2. In some embodiments, the amino acid sequence of the engineered RNase inhibitor comprises at least a substitution or substitution set of an even numbered SEQ ID NO. of SEQ ID NOs: 792-824 set forth in the Appendix, wherein the amino acid positions are relative to the reference sequence corresponding to residues 13 to 468 of SEQ ID NO: 2, or relative to the reference sequence corresponding to SEQ ID NO: 2.

[0166] In some embodiments, the amino acid sequence of the engineered RNase inhibitor comprises at least a substitution at an amino acid position provided in Tables 8.1, 9.1, 9.2, 10.1, 11.1, 12.1, 12.2, 13.1, 13.2, 14.1, 14.2, and the Appendix, wherein the amino acid positions are relative to the reference sequence corresponding to residues 13 to 468 of SEQ ID NO: 2, or relative to the reference sequence corresponding to SEQ ID NO: 2.

[0167] In some embodiments, the amino acid sequence of the engineered RNase inhibitor comprises at least one substitution provided in Tables 8.1, 9.1, 9.2, 10.1, 11.1, 12.1, 12.2, 13.1, 13.2, 14.1, 14.2, and

[0168] Appendix, wherein the amino acid positions are relative to the reference sequence corresponding to residues 13 to 468 of SEQ ID NO: 2, or relative to the reference sequence corresponding to SEQ ID NO: 2.

[0169] In some embodiments, the amino acid sequence of the engineered RNase inhibitor comprises at least a substitution or substitution set at the amino acid position(s) provided in Tables 8.1, 9.1, 9.2, 10.1, 11.1, 12.1, 12.2, 13.1, 13.2, 14.1, 14.2, and Appendix, wherein the amino acid positions are relative to the reference sequence corresponding to residues 13 to 468 of SEQ ID NO: 2, or relative to the reference sequence corresponding to SEQ ID NO: 2.

[0170] In some embodiments, the amino acid sequence of the engineered RNase inhibitor comprises at least a substitution or substitution set of an RNase inhibitor variant provided in Tables 8.1, 9.1, 9.2, 10.1, 11.1, 12.1, 12.2, 13.1, 13.2, 14.1, 14.2, and Appendix, wherein the amino acid positions are relative to the reference sequence corresponding to residues 13 to 468 of SEQ ID NO: 2, or relative to the reference sequence corresponding to SEQ ID NO: 2.

[0171] In some embodiments, the engineered RNase inhibitor comprises an amino acid sequence having at least 70%, 75%, 80%, 81%, 82%, 83%, 84%, 85%, 86%, 87%, 88%, 89%, 90%, 91%, 92%, 93%, 94%, 95%, 96%, 97%, 98%, 99%, or more sequence identity to a reference sequence comprising a substitution or substitution set provided in Tables 8.1, 9.1, 9.2, 10.1, 11.1, 12.1, 12.2, 13.1, 13.2, 14.1, 14.2, and Appendix, wherein the amino acid positions are relative to the reference sequence corresponding to residues 13 to 468 of SEQ ID NO: 2, or relative to the reference sequence corresponding to SEQ ID NO: 2.

[0172] In some embodiments, the engineered RNase inhibitor comprises an amino acid sequence having at least 70%, 75%, 80%, 81%, 82%, 83%, 84%, 85%, 86%, 87%, 88%, 89%, 90%, 91%, 92%, 93%, 94%, 95%, 96%, 97%, 98%, 99%, or more sequence identity to the reference sequence corresponding to residues 13 to 468 of SEQ ID NO: 36, 238, 320, 360, 442, or 578, or to a reference sequence corresponding to SEQ ID NO: 36, 238, 320, 360, 442, or 578.

[0173] In some embodiments, the engineered RNase inhibitor comprises an amino acid sequence having at least 70%, 75%, 80%, 81%, 82%, 83%, 84%, 85%, 86%, 87%, 88%, 89%, 90%, 91%, 92%, 93%, 94%, 95%, 96%, 97%, 98%, 99% or more sequence identity to a reference sequence corresponding to residues 13 to 468 of an even numbered SEQ ID NO. of SEQ ID NOs: 26-824, or to a reference sequence corresponding to an even numbered SEQ ID NO. of SEQ ID NOs: 26-824.

[0174] In some embodiments, the engineered RNase inhibitor comprises an amino acid sequence having at least 70%, 75%, 80%, 81%, 82%, 83%, 84%, 85%, 86%, 87%, 88%, 89%, 90%, 91%, 92%, 93%, 94%, 95%, 96%, 97%, 98%, 99%, or more sequence identity to the reference sequence corresponding to residues 13 to 468 of SEQ ID NO: 36, 238, 320, 360, 442, or 578, or to the reference sequence corresponding to SEQ ID NO: 36, 238, 320, 360, 442, or 578, wherein the amino acid sequence comprises one or more substitutions relative to the reference sequence corresponding to residues 13 to 468 of SEQ ID NO: 36, 238, 320, 360, 442, or 578, or relative to the reference sequence corresponding to SEQ ID NO: 36, 238, 320, 360, 442, or 578.

[0175] In some embodiments, the engineered RNase inhibitor comprises an amino acid sequence having at least 70%, 75%, 80%, 81%, 82%, 83%, 84%, 85%, 86%, 87%, 88%, 89%, 90%, 91%, 92%, 93%, 94%, 95%, 96%, 97%, 98%, 99% or more sequence identity to a reference sequence corresponding to residues 13 to 468 of an even numbered SEQ ID NO. of SEQ ID NOs: 26-824, or to a reference sequence corresponding to an even numbered SEQ ID NO. of SEQ ID NOs: 26-824, wherein the amino acid sequence comprises one or more substitutions relative to the reference sequence corresponding to residues 13 to 468 of SEQ ID NO: 36, 238, 320, 360, 442, or 578, or relative to the reference sequence corresponding to SEQ ID NO: 36, 238, 320, 360, 442, or 578.

[0176] In some embodiments, the amino acid sequence of the engineered RNase inhibitor comprises at least a substitution at amino acid position 12, 13, 15, 28, 35, 37, 38, 40, 50, 51, 56, 57, 60, 64, 66, 78, 81, 83, 84, 90, 91, 94, 95, 107, 113, 118, 121, 124, 126, 135, 137, 138, 142, 145, 147, 148, 150, 156, 158, 167, 168, 173, 175, 176, 177, 178, 203, 205, 221, 228, 230, 237, 243, 257, 260, 265, 267, 272, 285, 291, 296, 317, 319, 323, 326, 332, 338, 341, 342, 345, 348, 351, 363, 367, 373, 377, 385, 386, 390, 395, 396, 400, 417, 419, 422, 429, 430, 452, 453, 459, or 466, or combinations thereof, wherein the amino acid positions are relative to the reference sequence corresponding to residues 13 to 468 of SEQ ID NO: 36, 238, 320, 360, 442, or 578, or relative to the reference sequence corresponding to SEQ ID NO: 36, 238, 320, 360, 442, or 578.

[0177] In some embodiments, the amino acid sequence of the engineered RNase inhibitor comprises at least a substitution or an amino acid residue 12K, 13T, 15R, 28A/H, 35R, 37A/C, 38A/C/R/T, 40I, 50Q/S/M, 51H, 56A, 57M/T/V, 60K/S, 64R/V, 661, 78K/T, 81F/M/T/V, 83L, 84I/V, 90G, 91K, 94L, 95E/Q, 107A/D/I/V, 113G, 118R, 121S, 124A, 126V, 135V, 137V, 138L, 142H/Q, 145E/G/I/M/S/V, 147E/P, 148Q/N, 150Q, 156M, 158C, 167K, 168F/I, 1731, 175F, 176S, 177T/V, 178D, 203E, 205I/L/P/V, 221S, 228A/L/K/R/Q, 230L, 237R, 243C/M/R/S, 257F/G/S/T/V, 260L/S/Y, 265L, 267H/K/R/T, 272N/Q, 285K/Q, 291E/P/S, 296I/L, 317S, 319G/T, 323E, 326L, 332L, 338V, 341C, 342A/H/M, 345A/S, 348T/K, 351K/R, 363E/M, 367A/L/V, 373A, 377S/T, 385A, 386G, 390G/S/T, 395C/E/I/L/M/V, 396A, 400L, 417L, 419D, 422V, 429L, 430G/L, 452K/R, 453A/F/K/L/M/R/W, 459E/K/M, or 466I, or combinations thereof, wherein the amino acid positions are relative to the reference sequence corresponding to residues 13 to 468 of SEQ ID NO: 36, 238, 320, 360, 442, or 578, or relative to the reference sequence corresponding to SEQ ID NO: 36, 238, 320, 360, 442, or 578.

[0178] In some embodiments, the amino acid sequence of the engineered RNase inhibitor comprises at least a substitution at amino acid position 50, 64, 81, 90, 95, 107, 113, 124, 142, 145, 147, 148, 176, 203, 205, 228, 243, 257, 272, 285, 291, 296, 319, 323, 342, 348, 390, 395, 452, 453, or 459, or combinations thereof, wherein the amino acid positions are relative to the reference sequence corresponding to residues 13 to 468 of SEQ ID NO: 36, 238, 320, 360, 442, or 578, or relative to the reference sequence corresponding to SEQ ID NO: 36, 238, 320, 360, 442, or 578.

[0179] In some embodiments, the amino acid sequence of the engineered RNase inhibitor comprises at least a substitution or an amino acid residue 50Q/S/M, 60K/S, 81F/M/T/V, 90G, 95E/Q, 107A/D/I/V, 113G, 124A, 142H/Q, 145E/G/I/M/S/V, 147E/P, 148Q/N, 176S, 203E, 205I/L/P/V, 228A/L/K/R/Q, 243C/M/R/S, 257F/G/S/T/V, 272N/Q, 285K/Q, 291E/P/S, 296I/L, 319G/T, 323E, 342A/H/M, 348T/K, 390G/S/T, 395C/E/I/L/M/V, 452K/R, 453A/F/K/L/M/R/W, or 459E/K/M, or combinations thereof, wherein the amino acid positions are relative to the reference sequence corresponding to residues 13 to 468 of SEQ ID NO: 36, 238, 320, 360, 442, or 578, or relative to the reference sequence corresponding to SEQ ID NO: 36, 238, 320, 360, 442, or 578.

[0180] In some embodiments, the amino acid sequence of the engineered RNase inhibitor comprises at least a substitution or an amino acid residue 50S, 64R, 81T, 90G, 95E, 107D, 113G, 124A, 142Q, 145V, 147E, 148N, 176S, 203E, 205P, 228R, 228L, 243M, 257T, 272N, 285Q, 291P, 296L, 319G, 323E, 342M, 348K, 390G, 395L, 452R, 453R, or 459E, or combinations thereof, wherein the amino acid positions are relative to the reference sequence corresponding to residues 13 to 468 of SEQ ID NO: 36, 238, 320, 360, 442, or 578, or relative to the reference sequence corresponding to SEQ ID NO: 36, 238, 320, 360, 442, or 578.

[0181] In some embodiments, the amino acid sequence of the engineered RNase inhibitor comprises at least a substitution at amino acid position 95, 296, or 459, or combinations thereof, wherein the amino acid positions are relative to the reference sequence corresponding to residues 13 to 468 of SEQ ID NO: 36, 238, 320, 360, 442, or 578, or relative to the reference sequence corresponding to SEQ ID NO: 36, 238, 320, 360, 442, or 578.

[0182] In some embodiments, the amino acid sequence of the engineered RNase inhibitor comprises at least a substitution or an amino acid residue 95E, 296L, or 459E, or combinations thereof, wherein the amino acid positions are relative to the reference sequence corresponding to residues 13 to 468 of SEQ ID NO: 36, 238, 320, 360, 442, or 578, or relative to the reference sequence corresponding to SEQ ID NO: 36, 238, 320, 360, 442, or 578.

[0183] In some embodiments, the engineered RNase inhibitor comprises an amino acid sequence having at least 70%, 75%, 80%, 81%, 82%, 83%, 84%, 85%, 86%, 87%, 88%, 89%, 90%, 91%, 92%, 93%, 94%, 95%, 96%, 97%, 98%, 99%, or more sequence identity to the reference sequence corresponding to residues 13 to 468 of SEQ ID NO: 36, or to the reference sequence corresponding to SEQ ID NO: 36, wherein the amino acid sequence comprises one or more substitutions relative to the reference sequence corresponding to residues 13 to 468 of SEQ ID NO: 36, or relative to the reference sequence corresponding to SEQ ID NO: 36.

[0184] In some embodiments, the engineered RNase inhibitor comprises an amino acid sequence having at least 70%, 75%, 80%, 81%, 82%, 83%, 84%, 85%, 86%, 87%, 88%, 89%, 90%, 91%, 92%, 93%, 94%, 95%, 96%, 97%, 98%, 99%, or more sequence identity to the reference sequence corresponding to residues 13 to 468 of an even-numbered SEQ ID NO. of SEQ ID NOs: 144-316, or to the reference sequence corresponding to an even-numbered SEQ ID NO. of SEQ ID NOs: 144-316, wherein the amino acid sequence comprises one or more substitutions relative to the reference sequence corresponding to residues 13 to 468 of SEQ ID NO: 36, or relative to the reference sequence corresponding to SEQ ID NO: 36.

[0185] In some embodiments, the amino acid sequence of the engineered RNase inhibitors comprises at least a substitution or substitution set at amino acid positions(s) 323/390/429, 257/323/429, 257/390, 257/323/390, 257/323/390/429, 257/429, 257/377/390, 135/257/323/377/390, 323/377/390/429, 257/323/377/390, 257/377/429, 158/257/323/377/390, 257/323/377/429, 167/257/323/390/429, 377/390/429, 377/390, 257/323/377/390/429, 257/377, 390/429, 257/377/390/429, 257/390/429, 390, 243/363/390, 113/257/351/363/429, 113/257/351/390/430, 113/257/272/390, 113/243/351/390/429, 257/272/345/348, 243/257/351/390, 113/243/257/272/390, 257/272/363/390/430, 257/351/390, 113/243/390/430, 113/257/267/351/363/400/430, 113/243/257/351/430, 243/267/341/390/395, 113/243/257/345/348, 113/243/257/348/390, 243/345/348/390, 113/243/257/345/430, 257/345/348/351/390/429/430, 272/345/390/429/430, 243/267/351, 243/272/345/390, 113/257/363/390, 243/390/429, 113/243/257/351/390, 113/243/272/345/348/430, 243/267/272/348/390, 113/257/272/345/348/363/430, 113/243/390/429/430, 113/243/257/272/351/363, 243/272/345/348/363/390/395, 113/243/272/351/363/390/395, 113/243/257/272/345/390/430, 113/243/267/272/363/390/430, 113/243/267/348/363/430, 113/243/257/351/390/430, 113/243/257/272/351/390, 113/243/267/390/430, 243/257/348/395/430, 243/345/348/429/430, 243/257/345/348/395, 243/257/272/351/400/429, 113/243/267, 113/390/430, 243/267/351/400, or 429/430, wherein the amino acid positions are relative to the reference sequence corresponding to residues 13 to 468 of SEQ ID NO: 36, or relative to the reference sequence corresponding to SEQ ID NO: 36.

[0186] In some embodiments, the amino acid sequence of the engineered RNase inhibitors comprises at least a substitution or substitution set 323E/390S/429L, 257F/323E/429L, 257F/390S, 257F/323E/390T, 257F/323E/390S/429L, 257F/429L, 257F/377T/390T, 135V/257F/323E/377S/390T, 323E/377T/390S/429L, 257F/323E/390S, 257F/323E/377S/390S, 257F/323E/377T/390T, 257F/377S/429L, 257F/390T, 158C/257F/323E/377T/390S, 257F/377T/429L, 257F/377S/390S, 257F/323E/377S/390T, 257F/323E/377T/429L, 167K/257F/323E/390S/429L, 323E/390T/429L, 257F/323E/390T/429L, 377T/390S/429L, 257F/377T/390S, 377T/390S, 257F/323E/377S/390S/429L, 257F/323E/377S/390T/429L, 257F/323E/377S/429L, 257F/377S, 390T/429L, 257F/323E/377T/390S, 257F/323E/377T/390S/429L, 257F/377T/390T/429L, 257F/390T/429L, 257F/377T/390S/429L, 257F/377S/390T, 257F/377S/390T/429L, 257F/390S/429L, 377S/390T, 390T, 243S/363E/390G, 113G/257F/351K/363E/429L, 113G/257V/351K/390S/430G, 113G/257V/272N/390S, 113G/243M/351K/390S/429L, 257V/272N/345A/348K, 243S/257T/351R/390S, 113G/243M/257T/272N/390G, 257T/272Q/363E/390G/430L, 257V/351K/390G, 113G/243S/390G/430G, 113G/257V/267H/351R/363E/400L/430L, 113G/243M/257V/351R/430G, 243M/267R/341C/390G/395L, 113G/243M/257T/345A/348K, 113G/243S/257F/348K/390G, 243S/345A/348K/390G, 113G/243M/257V/345A/430L, 257T/345A/348K/351R/390S/429L/430G, 272Q/345A/390G/429L/430L, 243M/267R/351K, 243R/272N/345A/390G, 113G/257T/363E/390G, 243S/390G/429L, 113G/243M/257F/351K/390G, 113G/243M/272Q/345A/348K/430G, 243M/267R/272Q/348K/390G, 113G/257T/272Q/345A/348K/363E/430L, 113G/243R/390G/429L/430L, 113G/243M/257F/272N/351R/363E, 243M/272Q/345A/348K/363E/390S/395L, 113G/243M/272Q/351R/363E/390S/395L, 113G/243R/257V/272Q/345A/390S/430L, 113G/243S/267R/272Q/363E/390S/430G, 113G/243M/267R/348K/363E/430L, 113G/243S/257T/351R/390G/430L, 113G/243S/257T/272N/351K/390S, 113G/243R/267R/390G/430G, 243R/257F/348K/395L/430G, 243R/345A/348K/429L/430L, 243M/257F/345A/348K/395L, 243S/257T/272N/351K/400L/429L, 113G/243M/267R, 243M/267R/351R, 113G/390S/430G, 243S/267R/351K/400L, or 429L/430G, wherein the amino acid positions are relative to the reference sequence corresponding to residues 13 to 468 of SEQ ID NO: 36, or relative to the reference sequence corresponding to SEQ ID NO: 36.

[0187] In some embodiments, the amino acid sequence of the engineered RNase inhibitors comprises at least a substitution or substitution set Q323E/A390S/V429L, R257F/Q323E/V429L, R257F/A390S, R257F/Q323E/A390T, R257F/Q323E/A390S/V429L, R257F/V429L, R257F/A377T/A390T, A135V/R257F/Q323E/A377S/A390T, Q323E/A377T/A390S/V429L, R257F/Q323E/A390S, R257F/Q323E/A377S/A390S, R257F/Q323E/A377T/A390T, R257F/A377S/V429L, R257F/A390T, Y158C/R257F/Q323E/A377T/A390S, R257F/A377T/V429L, R257F/A377S/A390S, R257F/Q323E/A377S/A390T, R257F/Q323E/A377T/V429L, E167K/R257F/Q323E/A390S/V429L, Q323E/A390T/V429L, R257F/Q323E/A390T/V429L, A377T/A390S/V429L, R257F/A377T/A390S, A377T/A390S, R257F/Q323E/A377S/A390S/V429L, R257F/Q323E/A377S/A390T/V429L, R257F/Q323E/A377S/V429L, R257F/A377S, A390T/V429L, R257F/Q323E/A377T/A390S, R257F/Q323E/A377T/A390S/V429L, R257F/A377T/A390T/V429L, R257F/A390T/V429L, R257F/A377T/A390S/V429L, R257F/A377S/A390T, R257F/A377S/A390T/V429L, R257F/A390S/V429L, A377S/A390T, A390T, D243S/C363E/A390G,

[0188] P113G/R257F/V351K/C363E/V429L, P113G/R257V/V351K/A390S/E430G,

[0189] P113G/R257V/D272N/A390S, P113G/D243M/V351K/A390S/V429L, R257V/D272N/T345A/T348K, D243S/R257T/V351R/A390S, P113G/D243M/R257T/D272N/A390G, R257T/D272Q/C363E/A390G/E430L, R257V/V351K/A390G, P113G/D243S/A390G/E430G,

[0190] P113G/R257V/V267H/V351R/C363E/V400L/E430L, P113G/D243M/R257V/V351R/E430G, D243M/V267R/S341C/A390G/A395L, P113G/D243M/R257T/T345A/T348K, P113G/D243S/R257F/T348K/A390G, D243S/T345A/T348K/A390G, P113G/D243M/R257V/T345A/E430L, R257T/T345A/T348K/V351R/A390S/V429L/E430G, D272Q/T345A/A390G/V429L/E430L, D243M/V267R/V351K, D243R/D272N/T345A/A390G, P113G/R257T/C363E/A390G, D243S/A390G/V429L, P113G/D243M/R257F/V351K/A390G, P113G/D243M/D272Q/T345A/T348K/E430G, D243M/V267R/D272Q/T348K/A390G, P113G/R257T/D272Q/T345A/T348K/C363E/E430L, P113G/D243R/A390G/V429L/E430L, P113G/D243M/R257F/D272N/V351R/C363E, D243M/D272Q/T345A/T348K/C363E/A390S/A395L, P113G/D243M/D272Q/V351R/C363E/A390S/A395L,

[0191] P113G/D243R/R257V/D272Q/T345A/A390S/E430L,

[0192] P113G/D243S/V267R/D272Q/C363E/A390S/E430G, P113G/D243M/V267R/T348K/C363E/E430L, P113G/D243S/R257T/V351R/A390G/E430L, P113G/D243S/R257T/D272N/V351K/A390S, P113G/D243R/V267R/A390G/E430G, D243R/R257F/T348K/A395L/E430G, D243R/T345A/T348K/V429L/E430L, D243M/R257F/T345A/T348K/A395L, D243S/R257T/D272N/V351K/V400L/V429L, P113G/D243M/V267R, D243M/V267R/V351R, P113G/A390S/E430G, D243S/V267R/V351K/V400L, or V429L/E430G, wherein the amino acid positions are relative to the reference sequence corresponding to residues 13 to 468 of SEQ ID NO: 36, or relative to the reference sequence corresponding to SEQ ID NO: 36.

[0193] In some embodiments, the engineered RNase inhibitor comprises an amino acid sequence having at least 70%, 75%, 80%, 81%, 82%, 83%, 84%, 85%, 86%, 87%, 88%, 89%, 90%, 91%, 92%, 93%, 94%, 95%, 96%, 97%, 98%, 99%, or more sequence identity to the reference sequence corresponding to residues 13 to 468 of SEQ ID NO: 238, or to the reference sequence corresponding to SEQ ID NO: 238, wherein the amino acid sequence comprises one or more substitutions relative to the reference sequence corresponding to residues 13 to 468 of SEQ ID NO: 238, or relative to the reference sequence corresponding to SEQ ID NO: 238.

[0194] In some embodiments, the engineered RNase inhibitor comprises an amino acid sequence having at least 70%, 75%, 80%, 81%, 82%, 83%, 84%, 85%, 86%, 87%, 88%, 89%, 90%, 91%, 92%, 93%, 94%, 95%, 96%, 97%, 98%, 99%, or more sequence identity to the reference sequence corresponding to residues 13 to 468 of an even-numbered SEQ ID NO. of SEQ ID NOs: 318-352, or to the reference sequence corresponding to an even-numbered SEQ ID NO. of SEQ ID NOs: 318-352, wherein the amino acid sequence comprises one or more substitutions relative to the reference sequence corresponding to residues 13 to 468 of SEQ ID NO: 238, or relative to the reference sequence corresponding to SEQ ID NO: 238.

[0195] In some embodiments, the amino acid sequence of the engineered RNase inhibitors comprises at least a substitution or substitution set at amino acid positions(s) 323/453, 323/348/452, 452/453, 323/351/430/452/453, 291, 145, 228, 323/429, 38, 150, 12, 173, 38/237, or 40, wherein the amino acid positions are relative to the reference sequence corresponding to residues 13 to 468 of SEQ ID NO: 238, or relative to the reference sequence corresponding to SEQ ID NO: 238.

[0196] In some embodiments, the amino acid sequence of the engineered RNase inhibitors comprises at least a substitution or substitution set 323E/453K, 323E/348K/452R, 452R/453A, 323E/351R/430L/452R/453A, 291P, 145E, 228A, 323E/429L, 145G, 145M, 38T, 150Q, 228R, 12K, 173I, 38C/237R, 40I, or 38R, wherein the amino acid positions are relative to the reference sequence corresponding to residues 13 to 468 of SEQ ID NO: 238, or relative to the reference sequence corresponding to SEQ ID NO: 238.

[0197] In some embodiments, the amino acid sequence of the engineered RNase inhibitors comprises at least a substitution or substitution set Q323E/S453K, Q323E/T348K/N452R, N452R/S453A, Q323E/V351R/E430L/N452R/S453A, E291P, L145E, G228A, Q323E/V429L, L145G, L145M, E38T, H150Q, G228R, T12K, L173I, E38C/Q237R, V40I, or E38R, wherein the amino acid positions are relative to the reference sequence corresponding to residues 13 to 468 of SEQ ID NO: 238, or relative to the reference sequence corresponding to SEQ ID NO: 238.

[0198] In some embodiments, the engineered RNase inhibitor comprises an amino acid sequence having at least 70%, 75%, 80%, 81%, 82%, 83%, 84%, 85%, 86%, 87%, 88%, 89%, 90%, 91%, 92%, 93%, 94%, 95%, 96%, 97%, 98%, 99%, or more sequence identity to the reference sequence corresponding to residues 13 to 468 of SEQ ID NO: 320, or to the reference sequence corresponding to SEQ ID NO: 320, wherein the amino acid sequence comprises one or more substitutions relative to the reference sequence corresponding to residues 13 to 468 of SEQ ID NO: 320, or relative to the reference sequence corresponding to SEQ ID NO: 320.

[0199] In some embodiments, the engineered RNase inhibitor comprises an amino acid sequence having at least 70%, 75%, 80%, 81%, 82%, 83%, 84%, 85%, 86%, 87%, 88%, 89%, 90%, 91%, 92%, 93%, 94%, 95%, 96%, 97%, 98%, 99%, or more sequence identity to the reference sequence corresponding to residues 13 to 468 of an even-numbered SEQ ID NO. of SEQ ID NOs: 354-390, or to the reference sequence corresponding to an even-numbered SEQ ID NO. of SEQ ID NOs: 354-390, wherein the amino acid sequence comprises one or more substitutions relative to the reference sequence corresponding to residues 13 to 468 of SEQ ID NO: 320, or relative to the reference sequence corresponding to SEQ ID NO: 320.

[0200] In some embodiments, the amino acid sequence of the engineered RNase inhibitor comprises at least a substitution or substitution set at amino acid position(s) 13/145/228/291/348/351,453, 12/13/453, 145/228/291/453, 13/145/453,145/291/453, 38/145/453, 12/145/453, 38/145/228/453, 15/28/81/124/221/285/317, 15/28/64/203/221/285/317, 15/57/81/124/148/203,12/453, 56/57/64/81/91/124/203/285/317, 66/90/142/176/205/319, 228/453, or 145/228/453, wherein the amino acid positions are relative to the reference sequence corresponding to residues 13 to 468 of SEQ ID NO: 320, or relative to the reference sequence corresponding to SEQ ID NO: 320.

[0201] In some embodiments, the amino acid sequence of the engineered RNase inhibitor comprises at least a substitution or substitution set 13T/145M/228A/291P/348T/351R, 453R, 12K/13T/453R, 145V/228R/291P/453R, 13T/145V/453R, 145M/228R/291P/453R, 145V/291P/453R, 38T/145V/453R, 12K/145M/453R, 453K, 38T/1451/228A/453R, 15R/28H/81T/124A/221S/285Q/317S, 15R/28H/64V/203E/221S/285Q/317S, 15R/57M/81T/124A/148N/203E, 12K/453K, 56A/57T/64V/81T/91K/124A/203E/285Q/317S, 661/90G/142H/176S/205P/319G, 228R/453K, or 1451/228A/453A, wherein the amino acid positions are relative to the reference sequence corresponding to residues 13 to 468 of SEQ ID NO: 320, or relative to the reference sequence corresponding to SEQ ID NO: 320.

[0202] In some embodiments, the amino acid sequence of the engineered RNase inhibitor comprises at least a substitution or substitution set M13T/L145M/G228A/E291P/K348T/V351R, S453R, T12K/M13T/S453R, L145V/G228R/E291P/S453R, M13T/L145V/S453R, L145M/G228R/E291P/S453R, L145V/E291P/S453R, E38T/L145V/S453R, T12K/L145M/S453R, S453K, E38T/L145I/G228A/S453R, L15R/T28H/H81T/E124A/A221S/R285Q/E317S, L15R/T28H/S64V/D203E/A221S/R285Q/E317S, L15R/S57M/H81T/E124A/Q148N/D203E, T12K/S453K, S56A/S57T/S64V/H81T/T91K/E124A/D203E/R285Q/E317S, T66I/P90G/S142H/K176S/A205P/A319G, G228R/S453K, or L145I/G228A/S453A, wherein the amino acid positions are relative to the reference sequence corresponding to residues 13 to 468 of SEQ ID NO: 320, or relative to the reference sequence corresponding to SEQ ID NO: 320.

[0203] In some embodiments, the engineered RNase inhibitor comprises an amino acid sequence having at least 70%, 75%, 80%, 81%, 82%, 83%, 84%, 85%, 86%, 87%, 88%, 89%, 90%, 91%, 92%, 93%, 94%, 95%, 96%, 97%, 98%, 99%, or more sequence identity to the reference sequence corresponding to residues 13 to 468 of SEQ ID NO: 360, or to the reference sequence corresponding to SEQ ID NO: 360, wherein the amino acid sequence comprises one or more substitutions relative to the reference sequence corresponding to residues 13 to 468 of SEQ ID NO: 360, or relative to the reference sequence corresponding to SEQ ID NO: 360.

[0204] In some embodiments, the engineered RNase inhibitor comprises an amino acid sequence having at least 70%, 75%, 80%, 81%, 82%, 83%, 84%, 85%, 86%, 87%, 88%, 89%, 90%, 91%, 92%, 93%, 94%, 95%, 96%, 97%, 98%, 99%, or more sequence identity to the reference sequence corresponding to residues 13 to 468 of an even-numbered SEQ ID NO. of SEQ ID NOs: 392-554, or to the reference sequence corresponding to an even-numbered SEQ ID NO. of SEQ ID NOs: 392-554, wherein the amino acid sequence comprises one or more substitutions relative to the reference sequence corresponding to residues 13 to 468 of SEQ ID NO: 360, or relative to the reference sequence corresponding to SEQ ID NO: 360.

[0205] In some embodiments, the amino acid sequence of the engineered RNase inhibitor comprises at least a substitution or substitution set at amino acid position(s) 319, 37, 60, 342, 81, 50, 395, 64, 177, 107, 373, 205, 35, 78, 228, 178, 285, 37/142/148/203/205/285/319, 50/81/90/124/147/148/203/205/285, 66/90/148/285/317/319, 28/37/91/142/205/285, 50/91/124/142/147/148/203/205/317/319, 50/66/90/91/124/142/285/317, 147/148/203/285/317/319, 50/66/81/90/205/319, 50/66/124/203/205/317/319, 28/66/84/90/91/142/205/319, 37/91/148/205/319, 28/66/81/124/147/285/319, 28/50/66/84/90/147/203/205/317, 28/50/90/91/124/142/319, 37/81/147/148/203/205, 28/66/81/90/91/124/203/285/317/319, 28/50/66/81/90/91/138/147/148/205/285/319, 28/37/50/124/319, 81/90/91/124/285/317, 50/90/142/203/285, 50/90/124/142/205/285/319, 28/66/90/91/147/148/205/319/326, 66/81/319, 28/66/90/203/205/319, 50/66/90/91/205, 50/66/147/205, 37/81/285, 50/66/90/91/319, 50/147/203/285, 37/50/81/148, 28/66/142/319, 15/28/66/81/90/91/147/148/319, 15/28/81/90/91/142/285/317/319, 15/28/37/50/66/124/147/148/205/285, 15/66/81/147/148, 66/91/124/142/147/148, 15/37/66/81/147/148/317/319, 15/50/90/91/124/142/147/285/317/319, 15/50/90/91/142/147/148/203/205, 15/28/81/142/147/148/285/317/319, 15/28/50/66/90/91/203/285/319, 15/66/90/91/147/148/205/285, 15/28/90/91/142/147/148/285/317/319, 15/37/91/148/285/319, 81/147/148/203/205, 147/148/285/319, 15/50/90/147/148, 15/66/81/90/285/319, 50/81/147/148/285, 37/147/148/285, 15/37/66/84/90/91/203/285/317, 15/84/90/91/203/285, 37/90/91/147, 90/91/205/317/319, 50/148/203/317, 15/28/50/66/81/84/90/285/317, 15/81/147, or 15/285, wherein the amino acid positions are relative to the reference sequence corresponding to residues 13 to 468 of SEQ ID NO: 360, or relative to the reference sequence corresponding to SEQ ID NO: 360.

[0206] In some embodiments, the amino acid sequence of the engineered RNase inhibitor comprises at least a substitution or substitution set 319T, 37C, 60K, 342A, 342M, 81V, 81M, 50S, 395L, 64R, 177T, 107D, 50Q, 37A, 373A, 319G, 205L, 2051, 205V, 35R, 78K, 228L, 178D, 285K, 37A/142Q/148N/203E/205P/285Q/319G, 50S/81T/90G/124A/147E/148N/203E/205P/285Q, 661/90G/148N/285Q/317S/319G, 28H/37A/91K/142Q/205P/285Q, 50S/91K/124A/142Q/147E/148N/203E/205P/317S/319G, 50S/661/90G/91K/124A/142Q/285Q/317S, 147E/148N/203E/285Q/317S/319G, 50S/661/81T/90G/205P/319G, 50S/66I/124A/203E/205P/317S/319G, 28H/661/841/90G/91K/142Q/205P/319G, 37A/91K/148N/205P/319G, 28H/661/81T/124A/147E/285Q/319G, 28H/50S/661/841/90G/147E/203E/205P/317S, 28H/50S/90G/91K/124A/142Q/319G, 37A/81T/147E/148N/203E/205P, 28H/66I/81T/90G/91K/124A/203E/285Q/317S/319G, 28H/50S/66I/81T/90G/91K/138L/147E/148N/205P/285Q/319G, 28H/37A/50S/124A/319G, 81T/90G/91K/124A/285Q/317S, 50S/90G/142Q/203E/285Q, 50S/90G/124A/142Q/205P/285Q/319G, 28H/661/90G/91K/147E/148N/205P/319G/326L, 661/81T/319G, 28H/66I/90G/203E/205P/319G, 50S/66I/90G/91K/205P, 50S/66I/147E/205P, 37A/81T/285Q, 50S/661/90G/91K/319G, 50S/147E/203E/285Q, 37A/50S/81T/148N, 28H/66I/142Q/319G, 15R/28H/66I/81T/90G/91K/147E/148N/319G, 15R/28H/81T/90G/91K/142Q/285Q/317S/319G, 15R/28H/37A/50S/66I/124A/147E/148N/205P/285Q, 15R/661/81T/147E/148N, 661/91K/124A/142Q/147E/148N, 15R/37A/66I/81T/147E/148N/317S/319G, 15R/50S/90G/91K/124A/142Q/147E/285Q/317S/319G, 15R/50S/90G/91K/142Q/147E/148N/203E/205P, 15R/28H/81T/142Q/147E/148N/285Q/317S/319G, 15R/28H/50S/661/90G/91K/203E/285Q/319G, 15R/66I/90G/91K/147E/148N/205P/285Q, 15R/28H/90G/91K/142Q/147E/148N/285Q/317S/319G, 15R/37A/91K/148N/285Q/319G, 81T/147E/148N/203E/205P, 147E/148N/285Q/319G, 15R/50S/90G/147E/148N, 15R/66I/81T/90G/285Q/319G, 50S/81T/147E/148N/285Q, 37A/147E/148N/285Q, 15R/37A/66I/84V/90G/91K/203E/285Q/317S, 15R/841/90G/91K/203E/285Q, 37A/90G/91K/147E, 90G/91K/205P/317S/319G, 50S/148N/203E/317S, 15R/28H/50S/661/81T/841/90G/285Q/317S, 15R/81T/147E, or 15R/285Q, wherein the amino acid positions are relative to the reference sequence corresponding to residues 13 to 468 of SEQ ID NO: 360, or relative to the reference sequence corresponding to SEQ ID NO: 360.

[0207] In some embodiments, the amino acid sequence of the engineered RNase inhibitor comprises at least a substitution or substitution set A319T, S37C, Q60K, S342A, S342M, H81V, H81M, M50S, A395L, S64R, R177T, T107D, M50Q, S37A, S373A, A319G, A205L, A2051, A205V, Q35R, A78K, R228L, H178D, R285K, S37A/S142Q/Q148N/D203E/A205P/R285Q/A319G, M50S/H81T/P90G/E124A/P147E/Q148N/D203E/A205P/R285Q, T66I/P90G/Q148N/R285Q/E317S/A319G, T28H/S37A/T91K/S142Q/A205P/R285Q, M50S/T91K/E124A/S142Q/P147E/Q148N/D203E/A205P/E317S/A319G, M50S/T66I/P90G/T91K/E124A/S142Q/R285Q/E317S, P147E/Q148N/D203E/R285Q/E317S/A319G, M50S/T66I/H81T/P90G/A205P/A319G, M50S/T66I/E124A/D203E/A205P/E317S/A319G, T28H/T66I/L84I/P90G/T91K/S142Q/A205P/A319G, S37A/T91K/Q148N/A205P/A319G, T28H/T66I/H81T/E124A/P147E/R285Q/A319G,

[0208] T28H/M50S/T66I/L84I/P90G/P147E/D203E/A205P/E317S, T28H/M50S/P90G/T91K/E124A/S142Q/A319G, S37A/H81T/P147E/Q148N/D203E/A205P, T28H/T66I/H81T/P90G/T91K/E124A/D203E/R285Q/E317S/A319G,

[0209] T28H/M50S/T66I/H81T/P90G/T91K/Q138L/P147E/Q148N/A205P/R285Q/A319G, T28H/S37A/M50S/E124A/A319G, H81T/P90G/T91K/E124A/R285Q/E317S, M50S/P90G/S142Q/D203E/R285Q, M50S/P90G/E124A/S142Q/A205P/R285Q/A319G,

[0210] T28H/T66I/P90G/T91K/P147E/Q148N/A205P/A319G/W326L, T66I/H81T/A319G, T28H/T66I/P90G/D203E/A205P/A319G, M50S/T66I/P90G/T91K/A205P, M50S/T66I/P147E/A205P, S37A/H81T/R285Q, M50S/T66I/P90G/T91K/A319G, M50S/P147E/D203E/R285Q, S37A/M50S/H81T/Q148N, T28H/T66I/S142Q/A319G,

[0211] L15R/T28H/T66I/H81T/P90G/T91K/P147E/Q148N/A319G, L15R/T28H/H81T/P90G/T91K/S142Q/R285Q/E317S/A319G,

[0212] L15R/T28H/S37A/M50S/T66I/E124A/P147E/Q148N/A205P/R285Q, L15R/T66I/H81T/P147E/Q148N, T66I/T91K/E124A/S142Q/P147E/Q148N, L15R/S37A/T66I/H81T/P147E/Q148N/E317S/A319G,

[0213] L15R/M50S/P90G/T91K/E124A/S142Q/P147E/R285Q/E317S/A319G,

[0214] L15R/M50S/P90G/T91K/S142Q/P147E/Q148N/D203E/A205P, L15R/T28H/H81T/S142Q/P147E/Q148N/R285Q/E317S/A319G, L15R/T28H/M50S/T66I/P90G/T91K/D203E/R285Q/A319G, L15R/T66I/P90G/T91K/P147E/Q148N/A205P/R285Q, L15R/T28H/P90G/T91K/S142Q/P147E/Q148N/R285Q/E317S/A319G, L15R/S37A/T91K/Q148N/R285Q/A319G, H81T/P147E/Q148N/D203E/A205P, P147E/Q148N/R285Q/A319G, L15R/M50S/P90G/P147E/Q148N, L15R/T66I/H81T/P90G/R285Q/A319G, M50S/H81T/P147E/Q148N/R285Q, S37A/P147E/Q148N/R285Q, L15R/S37A/T66I/L84V/P90G/T91K/D203E/R285Q/E317S, L15R/L84I/P90G/T91K/D203E/R285Q, S37A/P90G/T91K/P147E, P90G/T91K/A205P/E317S/A319G, M50S/Q148N/D203E/E317S, L15R/T28H/M50S/T66I/H81T/L84I/P90G/R285Q/E317S, L15R/H81T/P147E, or L15R/R285Q, wherein the amino acid positions are relative to the reference sequence corresponding to residues 13 to 468 of SEQ ID NO: 360, or relative to the reference sequence corresponding to SEQ ID NO: 360.

[0215] In some embodiments, the engineered RNase inhibitor comprises an amino acid sequence having at least 70%, 75%, 80%, 81%, 82%, 83%, 84%, 85%, 86%, 87%, 88%, 89%, 90%, 91%, 92%, 93%, 94%, 95%, 96%, 97%, 98%, 99%, or more sequence identity to the reference sequence corresponding to residues 13 to 468 of SEQ ID NO: 442, or to the reference sequence corresponding to SEQ ID NO: 442, wherein the amino acid sequence comprises one or more substitutions relative to the reference sequence corresponding to residues 13 to 468 of SEQ ID NO: 442, or relative to the reference sequence corresponding to SEQ ID NO: 442.

[0216] In some embodiments, the engineered RNase inhibitor comprises an amino acid sequence having at least 70%, 75%, 80%, 81%, 82%, 83%, 84%, 85%, 86%, 87%, 88%, 89%, 90%, 91%, 92%, 93%, 94%, 95%, 96%, 97%, 98%, 99%, or more sequence identity to the reference sequence corresponding to residues 13 to 468 of an even-numbered SEQ ID NO. of SEQ ID NOs: 556-724, or to the reference sequence corresponding to an even-numbered SEQ ID NO. of SEQ ID NOs: 556-724, wherein the amino acid sequence comprises one or more substitutions relative to the reference sequence corresponding to residues 13 to 468 of SEQ ID NO: 442, or relative to the reference sequence corresponding to SEQ ID NO: 442.

[0217] In some embodiments, the amino acid sequence of the engineered RNase inhibitor comprises at least a substitution or substitution set at amino acid position(s) 78/260,396, 345, 37, 342, 395, 367, 38, 107, 228, 260, 57, 50/51, 338, 285/291/385, 175, 60, 145/147/148, 177, 28, 118, 64, 37/60/142/176/228/291/317, 60/64/317/319/342, 66/228/319/342/395, 37/142/291/317, 64/107/142/291/319/342/395, 37/60/317/319/342/395, 37/60/107/142/176/317/319/342, 142/317/319/342/395, 176/228/319/395, 228/291/342/395, 64/395, 64/107/142/176/228/319/342/395, 60/64/107/142/291/319/342, 37/66/107/291/317, 37/66/107/317/395, 37/228/317/395, 342/395, 66/142/319/342/395, 66/142/228/395, 363, 142/395, 60/64/177/291/395, 66/319, 64/107/177/228/291/317/395, 64/142/177/228/317, 60/228/317/395, 60/64/176/317/342, 177/228/342/395, 64/142/177/317/319, 60/64/107/342, 60/107/142/291/317/342/395, 66/228/319, 64/228/317/319, 168, 319/395, 37/107/228, 66/142, 37/342, 60/64/176/228/395, 60/64/342, 35, 60/66/395, 319, 291/317/319/342/395, 37/177,107, 37/60/64/142/291, 37/60/142/228/291, 60/319/342, 66/176/317/319/395, or 37/177/228, wherein the amino acid positions are relative to the reference sequence corresponding to residues 13 to 468 of SEQ ID NO: 442, or relative to the reference sequence corresponding to SEQ ID NO: 442.

[0218] In some embodiments, the amino acid sequence of the engineered RNase inhibitor comprises at least a substitution or substitution set 78T/260Y, 396A, 345S, 37C, 342H, 395V, 367V, 395L, 367L, 38A, 107V, 228K, 260L, 57V, 50M/51H, 338V, 285R/291E/385A, 175F, 60K, 228Q, 145S/147P/148Q, 395M, 60S, 177V, 367A, 260S, 28A, 118R, 64V, 37A/60K/142Q/176S/228L/291S/317S, 60K/64R/317S/319G/342A, 661/228L/319G/342M/395L, 37A/142Q/291S/317S, 64R/107D/142Q/291S/319G/342A/395L, 37A/60K/317S/319G/342A/395L, 37A/60K/107D/142Q/176S/317S/319G/342M, 142Q/317S/319G/342M/395L, 176S/228L/319G/395L, 228L/291S/342M/395L, 64R/395L, 64R/107D/142Q/176S/228L/319G/342M/395L, 395E, 60K/64R/107D/142Q/291S/319G/342M, 37A/66I/107D/291S/317S, 37A/66I/107D/317S/395L, 37A/228L/317S/395L, 342A/395L, 661/142Q/319G/342M/395L, 661/142Q/228L/395L, 363M, 142Q/395L, 60K/64R/177T/291S/395L, 661/319G, 64R/107D/177T/228L/291S/317S/395L, 342M/395L, 64R/142Q/177T/228L/317S, 37C, 260L, 60K/228L/317S/395L, 60K/64R/176S/317S/342M, 177T/228L/342M/395L, 64R/142Q/177T/317S/319G, 60K/64R/107D/342M, 60K/107D/142Q/291S/317S/342M/395L, 66I/228L/319G, 64R/228L/317S/319G, 168F, 319G/395L, 37A/107D/228L, 661/142Q, 37A/342M, 60K/64R/176S/228L/395L, 60K/64R/342M, 35R, 60K/661/395L, 319G, 291S/317S/319G/342M/395L, 37A/177T, 107V, 37A, 37A/60K/64R/142Q/291S, 37A/60K/142Q/228L/291S, 60K/319G/342A, 661/176S/317S/319G/395L, or 37A/177T/228L, wherein the amino acid positions are relative to the reference sequence corresponding to residues 13 to 468 of SEQ ID NO: 442, or relative to the reference sequence corresponding to SEQ ID NO: 442.

[0219] In some embodiments, the amino acid sequence of the engineered RNase inhibitor comprises at least a substitution or substitution set A78T/H260Y, S396A, T345S, S37C, S342H, A395V, Q367V, A395L, Q367L, E38A, T107V, R228K, H260L, S57V, S50M/R51H, Q338V, Q285R/P291E/G385A, A175F, Q60K, R228Q, V145S/E147P/N148Q, A395M, Q60S, R177V, Q367A, H260S, T28A, S118R, S64V, S37A/Q60K/S142Q/K176S/R228L/P291S/E317S, Q60K/S64R/E317S/A319G/S342A, T66I/R228L/A319G/S342M/A395L, S37A/S142Q/P291S/E317S,

[0220] S64R/T107D/S142Q/P291S/A319G/S342A/A395L, S37A/Q60K/E317S/A319G/S342A/A395L, S37A/Q60K/T107D/S142Q/K176S/E317S/A319G/S342M, S142Q/E317S/A319G/S342M/A395L, K176S/R228L/A319G/A395L, R228L/P291S/S342M/A395L, S64R/A395L, S64R/T107D/S142Q/K176S/R228L/A319G/S342M/A395L, A395E, Q60K/S64R/T107D/S142Q/P291S/A319G/S342M, S37A/T66I/T107D/P291S/E317S, S37A/T66I/T107D/E317S/A395L, S37A/R228L/E317S/A395L, S342A/A395L, T66I/S142Q/A319G/S342M/A395L, T66I/S142Q/R228L/A395L, C363M, S142Q/A395L, Q60K/S64R/R177T/P291S/A395L, T66I/A319G, S64R/T107D/R177T/R228L/P291S/E317S/A395L, S342M/A395L, S64R/S142Q/R177T/R228L/E317S, S37C, H260L, Q60K/R228L/E317S/A395L, Q60K/S64R/K176S/E317S/S342M, R177T/R228L/S342M/A395L, S64R/S142Q/R177T/E317S/A319G, Q60K/S64R/T107D/S342M, Q60K/T107D/S142Q/P291S/E317S/S342M/A395L, T66I/R228L/A319G, S64R/R228L/E317S/A319G, S168F, A319G/A395L, S37A/T107D/R228L, T66I/S142Q, S37A/S342M, Q60K/S64R/K176S/R228L/A395L, Q60K/S64R/S342M, Q35R, Q60K/T66I/A395L, A319G, P291S/E317S/A319G/S342M/A395L, S37A/R177T, T107V, S37A, S37A/Q60K/S64R/S142Q/P291S, S37A/Q60K/S142Q/R228L/P291S, Q60K/A319G/S342A, T66I/K176S/E317S/A319G/A395L, or S37A/R177T/R228L, wherein the amino acid positions are relative to the reference sequence corresponding to residues 13 to 468 of SEQ ID NO: 442, or relative to the reference sequence corresponding to SEQ ID NO: 442.

[0221] In some embodiments, the engineered RNase inhibitor comprises an amino acid sequence having at least 70%, 75%, 80%, 81%, 82%, 83%, 84%, 85%, 86%, 87%, 88%, 89%, 90%, 91%, 92%, 93%, 94%, 95%, 96%, 97%, 98%, 99%, or more sequence identity to the reference sequence corresponding to residues 13 to 468 of SEQ ID NO: 578, or to the reference sequence corresponding to SEQ ID NO: 578, wherein the amino acid sequence comprises one or more substitutions relative to the reference sequence corresponding to residues 13 to 468 of SEQ ID NO: 578, or relative to the reference sequence corresponding to SEQ ID NO: 578.

[0222] In some embodiments, the engineered RNase inhibitor comprises an amino acid sequence having at least 70%, 75%, 80%, 81%, 82%, 83%, 84%, 85%, 86%, 87%, 88%, 89%, 90%, 91%, 92%, 93%, 94%, 95%, 96%, 97%, 98%, 99%, or more sequence identity to the reference sequence corresponding to residues 13 to 468 of an even-numbered SEQ ID NO. of SEQ ID NOs: 726-824, or to the reference sequence corresponding to an even-numbered SEQ ID NO. of SEQ ID NOs: 726-824, wherein the amino acid sequence comprises one or more substitutions relative to the reference sequence corresponding to residues 13 to 468 of SEQ ID NO: 578, or relative to the reference sequence corresponding to SEQ ID NO: 578.

[0223] In some embodiments, the amino acid sequence of the engineered RNase inhibitor comprises at least a substitution set at amino acid positions 28/118/175/260/338/367, 118/168/260/396, 38/60/168/260/338/367, 28/38/57/60/260/363/367, 57/118/260/338/367, 57/118/168/177/260/338/367, 260/396, 28/118/168/260/367/396, 28/260/338, 28/60/168/260, 57/60/118/175/177/260/338, 28/57/260/338/367, 35/260/338/367, 118/175/260/338, 168/260, 57/60/168/177/260/338/367, 28/168/260/338, 260/367, 28/57/137/260, 38/60/175/260/338, 38/60/260/367/396, 57/60/260/363/367, 60/260/367, 28/38/60/260/367, 60/168,260/363/367, 177/260/363/367, 38/260, 28/60/118/177/260, 28/35/60/118/175/260, 60/367, 28/60/118, 57/118,118/260/338/396, 28/38/57/60/118/177/260/338/363/367/396, 28/38/60/260/363/367, 28/35/38/57/118/260/363/367, 28/57/60/168/260/367, 168/175/260/338/367, 57/60/168/260/338/363/367/396, 60/168/363/367/396, 28/38/57/60/118/168/260/367, 28/175/260/367, 60/363/367/396, 260/338/367, 28/57/260/338/363/367, 168/260/367, 367/396, 28/35/175/260/367/396, or 57/60/168/260/367, wherein the amino acid positions are relative to the reference sequence corresponding to residues 13 to 468 of SEQ ID NO: 578, or relative to the reference sequence corresponding to SEQ ID NO: 578.

[0224] In some embodiments, the amino acid sequence of the engineered RNase inhibitor comprises at least a substitution set 28A/118R/175F/260S/338V/367L, 118R/168F/260Y/396A, 38A/60S/168F/260L/338V/367L, 28A/38A/57V/60S/260L/363M/367L, 57V/118R/260L/338V/367L, 57V/118R/168F/177V/260L/338V/367L, 260Y/396A, 28A/118R/168F/260L/367L/396A, 28A/260L/338V, 28A/60K/168I/260L, 57V/60K/118R/175F/177V/260L/338V, 28A/57V/260Y/338V/367L, 35R/260S/338V/367L, 118R/175F/260L/338V, 168F/260L, 57V/60S/168F/177V/260S/338V/367L, 28A/168F/260S/338V, 260Y/367L, 28A/57V/137V/260L, 38A/60K/175F/260L/338V, 38A/60K/260S/367A/396A, 57V/60K/260S/363M/367V, 60K/260L/367A, 28A/38A/60K/260S/367L, 60S/168F, 260L/363M/367A, 177V/260Y/363M/367V, 38A/260L, 28A/60K/118R/177V/260Y, 28A/35R/60S/118R/175F/260Y, 60S/367L, 28A/60S/118R, 57V/118R, 118R/260L/338V/396A, 28A/118R/168F/260L/367L/396A, 28A/38A/57V/60K/118R/177V/260Y/338V/363M/367L/396A, 28A/38A/60S/260L/363M/367L, 28A/35R/38A/57V/118R/260L/363M/367L, 28A/57V/60S/168F/260L/367A, 168F/175F/260L/338V/367L, 57V/60S/168F/260Y/338V/363M/367V/396A, 60S/168F/363M/367L/396A, 28A/38A/57V/60K/118R/168F/260L/367L, 28A/175F/260L/367L, 28A/38A/57V/60S/260L/363M/367L, 60S/363M/367L/396A, 260S/338V/367L, 28A/57V/260Y/338V/363M/367L, 168F/260L/367L, 367L/396A, 28A/35R/175F/260Y/367L/396A, or 57V/60K/168F/260L/367L, wherein the amino acid positions are relative to the reference sequence corresponding to residues 13 to 468 of SEQ ID NO: 578, or relative to the reference sequence corresponding to SEQ ID NO: 578.

[0225] In some embodiments, the amino acid sequence of the engineered RNase inhibitor comprises at least a substitution set T28A/S118R/A175F/H260S/Q338V/Q367L, S118R/S168F/H260Y/S396A,

[0226] E38A/Q60S/S168F/H260L/Q338V/Q367L, T28A/E38A/S57V/Q60S/H260L/C363M/Q367L, S57V/S118R/H260L/Q338V/Q367L, S57V/S118R/S168F/R177V/H260L/Q338V/Q367L, H260Y/S396A, T28A/S118R/S168F/H260L/Q367L/S396A, T28A/H260L/Q338V, T28A/Q60K/S168I/H260L, S57V/Q60K/S118R/A175F/R177V/H260L/Q338V, T28A/S57V/H260Y/Q338V/Q367L, Q35R/H260S/Q338V/Q367L, S118R/A175F/H260L/Q338V, S168F/H260L, S57V/Q60S/S168F/R177V/H260S/Q338V/Q367L, T28A/S168F/H260S/Q338V, H260Y/Q367L, T28A/S57V/L137V/H260L, E38A/Q60K/A175F/H260L/Q338V, E38A/Q60K/H260S/Q367A/S396A, S57V/Q60K/H260S/C363M/Q367V, Q60K/H260L/Q367A, T28A/E38A/Q60K/H260S/Q367L, Q60S/S168F, H260L/C363M/Q367A, R177V/H260Y/C363M/Q367V, E38A/H260L, T28A/Q60K/S118R/R177V/H260Y, T28A/Q35R/Q60S/S118R/A175F/H260Y, Q60S/Q367L, T28A/Q60S/S118R, S57V/S118R, S118R/H260L/Q338V/S396A, T28A/S118R/S168F/H260L/Q367L/S396A,

[0227] T28A/E38A/S57V/Q60K/S118R/R177V/H260Y/Q338V/C363M/Q367L/S396A, T28A/E38A/Q60S/H260L/C363M/Q367L, T28A/Q35R/E38A/S57V/S118R/H260L/C363M/Q367L, T28A/S57V/Q60S/S168F/H260L/Q367A, S168F/A175F/H260L/Q338V/Q367L, S57V/Q60S/S168F/H260Y/Q338V/C363M/Q367V/S396A, Q60S/S168F/C363M/Q367L/S396A, T28A/E38A/S57V/Q60K/S118R/S168F/H260L/Q367L, T28A/A175F/H260L/Q367L, T28A/E38A/S57V/Q60S/H260L/C363M/Q367L, Q60S/C363M/Q367L/S396A, H260S/Q338V/Q367L, T28A/S57V/H260Y/Q338V/C363M/Q367L, S168F/H260L/Q367L, Q367L/S396A,

[0228] T28A/Q35R/A175F/H260Y/Q367L/S396A, or S57V/Q60K/S168F/H260L/Q367L, wherein the amino acid positions are relative to the reference sequence corresponding to residues 13 to 468 of SEQ ID NO: 578, or relative to the reference sequence corresponding to SEQ ID NO: 578.

[0229] In some embodiments, the amino acid sequence of the engineered RNase inhibitor comprises at least a substitution at an amino acid position provided in Tables 8.1, 9.1, 9.2, 10.1, 11.1, 12.1, 12.2, 13.1, 13.2, 14.1, and 14.2, wherein the amino acid positions are relative to the reference sequence corresponding to residues 13 to 468 of SEQ ID NO: 36, 238, 320, 360, 442, or 578, or relative to the reference sequence corresponding to SEQ ID NO: 36, 238, 320, 360, 442, or 578.

[0230] In some embodiments, the amino acid sequence of the engineered RNase inhibitor comprises at least one substitution provided in Tables 8.1, 9.1, 9.2, 10.1, 11.1, 12.1, 12.2, 13.1, 13.2, 14.1, and 14.2, wherein the amino acid positions are relative to the reference sequence corresponding to residues 13 to 468 of SEQ ID NO: 36, 238, 320, 360, 442, or 578, or relative to the reference sequence corresponding to SEQ ID NO: 36, 238, 320, 360, 442, or 578.

[0231] In some embodiments, the amino acid sequence of the engineered RNase inhibitor comprises at least a substitution or substitution set at the amino acid position(s) set forth in Tables 8.1, 9.1, 9.2, 10.1, 11.1, 12.1, 12.2, 13.1, 13.2, 14.1, and 14.2, wherein the amino acid positions are relative to the reference sequence corresponding to residues 13 to 468 of SEQ ID NO: 36, 238, 320, 360, 442, or 578, or relative to the reference sequence corresponding to SEQ ID NO: 36, 238, 320, 360, 442, or 578.

[0232] In some embodiments, the amino acid sequence of the engineered RNase inhibitor comprises at least a substitution or substitution set of an RNase inhibitor variant provided in Tables 8.1, 9.1, 9.2, 10.1, 11.1, 12.1, 12.2, 13.1, 13.2, 14.1, and 14.2, wherein the amino acid positions are relative to the reference sequence corresponding to residues 13 to 468 of SEQ ID NO: 36, 238, 320, 360, 442, or 578, or relative to the reference sequence corresponding to SEQ ID NO: 36, 238, 320, 360, 442, or 578.

[0233] In some embodiments, the engineered RNase inhibitor comprises an amino acid sequence having at least 70%, 75%, 80%, 81%, 82%, 83%, 84%, 85%, 86%, 87%, 88%, 89%, 90%, 91%, 92%, 93%, 94%, 95%, 96%, 97%, 98%, 99% or more sequence identity to a reference sequence comprising a substitution or substitution set provided in Tables 8.1, 9.1, 9.2, 10.1, 11.1, 12.1, 12.2, 13.1, 13.2, 14.1, and 14.2, wherein the amino acid positions are relative to the reference sequence corresponding to residues 13 to 468 of SEQ ID NO: 2, 36, 238, 320, 360, 442, or 578, or relative to the reference sequence corresponding to SEQ ID NO: 2, 36, 238, 320, 360, 442, or 578.

[0234] In some embodiments, the engineered RNase inhibitor comprises an amino acid sequence having at least 70%, 75%, 80%, 81%, 82%, 83%, 84%, 85%, 86%, 87%, 88%, 89%, 90%, 91%, 92%, 93%, 94%, 95%, 96%, 97%, 98%, 99% or more sequence identity to the sequence comprising residues 13 to 468 of an engineered RNase inhibitor set forth in Tables 8.1, 9.1, 9.2, 10.1, 11.1, 12.1, 12.2, 13.1, 13.2, 14.1, and 14.2, or to the sequence of an engineered RNase inhibitor set forth in Tables 8.1, 9.1, 9.2, 10.1, 11.1, 12.1, 12.2, 13.1, 13.2, 14.1, and 14.2.

[0235] In some embodiments, the engineered RNase inhibitor comprises an amino acid sequence having at least 70%, 75%, 80%, 81%, 82%, 83%, 84%, 85%, 86%, 87%, 88%, 89%, 90%, 91%, 92%, 93%, 94%, 95%, 96%, 97%, 98%, 99% or more sequence identity to the sequence corresponding to residues 13 to 468 of SEQ ID NO: 26, 28, 30, 32, 34, 336, 38, 40, 42, 44, 46, 48, 50, 52, 54, 56, 58, 60, 62, 64, 66, 68, 70, 72, 74, 76, 78, 80, 82, 84, 86, 88, 90, 92, 94, 96, 98, 100, 102, 104, 106, 108, 110, 112, 114, 116, 118, 120, 122, 124, 126, 128, 130, 132, 134, 136, 138, 140, 142, 144, 146, 148, 150, 152, 154, 156, 158, 160, 162, 164, 166, 168, 170, 172, 174, 176, 178, 180, 182, 184, 186, 188, 190, 192, 194, 196, 198, 200, 202, 204, 206, 208, 210, 212, 214, 216, 218, 220, 222, 224, 226, 228, 230, 232, 234, 236, 238, 240, 242, 244, 246, 248, 250, 252, 254, 256, 258, 260, 262, 264, 266, 268, 270, 272, 274, 276, 278, 280, 282, 284, 286, 288, 290, 292, 294, 296, 298, 300, 302, 304, 306, 308, 310, 312, 314, 316, 318, 320, 322, 324, 326, 328, 330, 332, 334, 336, 338, 340, 342, 344, 346, 348, 350, 352, 354, 356, 358, 360, 362, 364, 366, 368, 370, 372, 374, 376, 378, 380, 382, 384, 386, 388, 390, 392, 394, 396, 398, 400, 402, 404, 406, 408, 410, 412, 414, 416, 418, 420, 422, 424, 426, 428, 430, 432, 434, 436, 438, 440, 442, 444, 446, 448, 450, 452, 454, 456, 458, 460, 462, 464, 466, 468, 470, 472, 474, 476, 478, 480, 482, 484, 486, 488, 490, 492, 494, 496, 498, 500, 502, 504, 506, 508, 510, 512, 514, 516, 518, 520, 522, 524, 526, 528, 530, 532, 534, 536, 538, 540, 542, 544, 546, 548, 550, 552, 554, 556, 558, 560, 562, 564, 568, 570, 572, 574, 576, 578, 580, 582, 584, 586, 588, 590, 592, 594, 596, 598, 600, 602, 604, 606, 608, 610, 612, 614, 616, 618, 620, 622, 624, 626, 628, 630, 632, 634, 636, 638, 640, 642, 644, 646, 648, 650, 652, 654, 656, 658, 660, 662, 664, 666, 668, 670, 672, 674, 676, 678, 680, 682, 684, 686, 688, 690, 692, 694, 696, 698, 700, 702, 704, 706, 708, 710, 712, 714, 716, 718, 720, 722, 724, 726, 728, 730, 732, 734, 736, 738, 740, 742, 744, 746, 748, 750, 752, 754, 756, 758, 760, 762, 764, 768, 770, 772, 774, 776, 778, 780, 782, 784, 786, 788, 790, 792, 794, 796, 798, 800, 802, 804, 806, 808, 810, 812, 814, 816, 818, 820, 822, or 824.

[0236] In some embodiments, the engineered RNase inhibitor comprises an amino acid sequence having at least 70%, 75%, 80%, 81%, 82%, 83%, 84%, 85%, 86%, 87%, 88%, 89%, 90%, 91%, 92%, 93%, 94%, 95%, 96%, 97%, 98%, 99% or more sequence identity to the sequence corresponding to 26, 28, 30, 32, 34, 336, 38, 40, 42, 44, 46, 48, 50, 52, 54, 56, 58, 60, 62, 64, 66, 68, 70, 72, 74, 76, 78, 80, 82, 84, 86, 88, 90, 92, 94, 96, 98, 100, 102, 104, 106, 108, 110, 112, 114, 116, 118, 120, 122, 124, 126, 128, 130, 132, 134, 136, 138, 140, 142, 144, 146, 148, 150, 152, 154, 156, 158, 160, 162, 164, 166, 168, 170, 172, 174, 176, 178, 180, 182, 184, 186, 188, 190, 192, 194, 196, 198, 200, 202, 204, 206, 208, 210, 212, 214, 216, 218, 220, 222, 224, 226, 228, 230, 232, 234, 236, 238, 240, 242, 244, 246, 248, 250, 252, 254, 256, 258, 260, 262, 264, 266, 268, 270, 272, 274, 276, 278, 280, 282, 284, 286, 288, 290, 292, 294, 296, 298, 300, 302, 304, 306, 308, 310, 312, 314, 316, 318, 320, 322, 324, 326, 328, 330, 332, 334, 336, 338, 340, 342, 344, 346, 348, 350, 352, 354, 356, 358, 360, 362, 364, 366, 368, 370, 372, 374, 376, 378, 380, 382, 384, 386, 388, 390, 392, 394, 396, 398, 400, 402, 404, 406, 408, 410, 412, 414, 416, 418, 420, 422, 424, 426, 428, 430, 432, 434, 436, 438, 440, 442, 444, 446, 448, 450, 452, 454, 456, 458, 460, 462, 464, 466, 468, 470, 472, 474, 476, 478, 480, 482, 484, 486, 488, 490, 492, 494, 496, 498, 500, 502, 504, 506, 508, 510, 512, 514, 516, 518, 520, 522, 524, 526, 528, 530, 532, 534, 536, 538, 540, 542, 544, 546, 548, 550, 552, 554, 556, 558, 560, 562, 564, 568, 570, 572, 574, 576, 578, 580, 582, 584, 586, 588, 590, 592, 594, 596, 598, 600, 602, 604, 606, 608, 610, 612, 614, 616, 618, 620, 622, 624, 626, 628, 630, 632, 634, 636, 638, 640, 642, 644, 646, 648, 650, 652, 654, 656, 658, 660, 662, 664, 666, 668, 670, 672, 674, 676, 678, 680, 682, 684, 686, 688, 690, 692, 694, 696, 698, 700, 702, 704, 706, 708, 710, 712, 714, 716, 718, 720, 722, 724, 726, 728, 730, 732, 734, 736, 738, 740, 742, 744, 746, 748, 750, 752, 754, 756, 758, 760, 762, 764, 766, 768, 770, 772, 774, 776, 778, 780, 782, 784, 786, 788, 790, 792, 794, 796, 798, 800, 802, 804, 806, 808, 810, 812, 814, 816, 818, 820, 822, or 824.

[0237] In some embodiments, the engineered RNase inhibitor comprises an amino acid sequence comprising residues 13 to 468 of an even numbered SEQ ID NO. of SEQ ID NOs: 26-824, or an amino acid sequence comprising an even numbered SEQ ID NO. of SEQ ID NOs: 26-824. In some embodiments, the amino acid sequence of the engineered RNase inhibitor optionally includes 1, 2, 3, 4, 5, 6, 7, 8, 9, or up to 10 substitutions, insertions, and/or deletions. In some embodiments, the amino acid sequence of the engineered RNase inhibitor optionally includes 1, 2, 3, 4, 5, 6, 7, 8, 9, or up to 10 substitutions. In some embodiments, the amino acid sequence of the engineered RNase inhibitor optionally includes 1, 2, 3, 4, or 5 substitutions, insertions, and/or deletions. In some embodiments, the amino acid sequence of the engineered RNase inhibitor optionally includes 1, 2, 3, 4, or 5 substitutions.

[0238] In some embodiments, the engineered RNase inhibitor comprises an amino acid sequence comprising residues 13 to 468 of SEQ ID NO: 26, 28, 30, 32, 34, 336, 38, 40, 42, 44, 46, 48, 50, 52, 54, 56, 58, 60, 62, 64, 66, 68, 70, 72, 74, 76, 78, 80, 82, 84, 86, 88, 90, 92, 94, 96, 98, 100, 102, 104, 106, 108, 110, 112, 114, 116, 118, 120, 122, 124, 126, 128, 130, 132, 134, 136, 138, 140, 142, 144, 146, 148, 150, 152, 154, 156, 158, 160, 162, 164, 166, 168, 170, 172, 174, 176, 178, 180, 182, 184, 186, 188, 190, 192, 194, 196, 198, 200, 202, 204, 206, 208, 210, 212, 214, 216, 218, 220, 222, 224, 226, 228, 230, 232, 234, 236, 238, 240, 242, 244, 246, 248, 250, 252, 254, 256, 258, 260, 262, 264, 266, 268, 270, 272, 274, 276, 278, 280, 282, 284, 286, 288, 290, 292, 294, 296, 298, 300, 302, 304, 306, 308, 310, 312, 314, 316, 318, 320, 322, 324, 326, 328, 330, 332, 334, 336, 338, 340, 342, 344, 346, 348, 350, 352, 354, 356, 358, 360, 362, 364, 366, 368, 370, 372, 374, 376, 378, 380, 382, 384, 386, 388, 390, 392, 394, 396, 398, 400, 402, 404, 406, 408, 410, 412, 414, 416, 418, 420, 422, 424, 426, 428, 430, 432, 434, 436, 438, 440, 442, 444, 446, 448, 450, 452, 454, 456, 458, 460, 462, 464, 466, 468, 470, 472, 474, 476, 478, 480, 482, 484, 486, 488, 490, 492, 494, 496, 498, 500, 502, 504, 506, 508, 510, 512, 514, 516, 518, 520, 522, 524, 526, 528, 530, 532, 534, 536, 538, 540, 542, 544, 546, 548, 550, 552, 554, 556, 558, 560, 562, 564, 568, 570, 572, 574, 576, 578, 580, 582, 584, 586, 588, 590, 592, 594, 596, 598, 600, 602, 604, 606, 608, 610, 612, 614, 616, 618, 620, 622, 624, 626, 628, 630, 632, 634, 636, 638, 640, 642, 644, 646, 648, 650, 652, 654, 656, 658, 660, 662, 664, 666, 668, 670, 672, 674, 676, 678, 680, 682, 684, 686, 688, 690, 692, 694, 696, 698, 700, 702, 704, 706, 708, 710, 712, 714, 716, 718, 720, 722, 724, 726, 728, 730, 732, 734, 736, 738, 740, 742, 744, 746, 748, 750, 752, 754, 756, 758, 760, 762, 764, 766, 768, 770, 772, 774, 776, 778, 780, 782, 784, 786, 788, 790, 792, 794, 796, 798, 800, 802, 804, 806, 808, 810, 812, 814, 816, 818, 820, 822, or 824. In some embodiments, the amino acid sequence of the engineered RNase inhibitor optionally includes 1, 2, 3, 4, 5, 6, 7, 8, 9, or up to 10 substitutions, insertions, and/or deletions. In some embodiments, the amino acid sequence of the engineered RNase inhibitor optionally includes 1, 2, 3, 4, 5, 6, 7, 8, 9, or up to 10 substitutions. In some embodiments, the amino acid sequence of the engineered RNase inhibitor optionally includes 1, 2, 3, 4, or 5 substitutions, insertions, and/or deletions. In some embodiments, the amino acid sequence of the engineered RNase inhibitor optionally includes 1, 2, 3, 4, or 5 substitutions.

[0239] In some embodiments, the engineered RNase inhibitor comprises an amino acid sequence comprising SEQ ID NO: 26, 28, 30, 32, 34, 336, 38, 40, 42, 44, 46, 48, 50, 52, 54, 56, 58, 60, 62, 64, 66, 68, 70, 72, 74, 76, 78, 80, 82, 84, 86, 88, 90, 92, 94, 96, 98, 100, 102, 104, 106, 108, 110, 112, 114, 116, 118, 120, 122, 124, 126, 128, 130, 132, 134, 136, 138, 140, 142, 144, 146, 148, 150, 152, 154, 156, 158, 160, 162, 164, 166, 168, 170, 172, 174, 176, 178, 180, 182, 184, 186, 188, 190, 192, 194, 196, 198, 200, 202, 204, 206, 208, 210, 212, 214, 216, 218, 220, 222, 224, 226, 228, 230, 232, 234, 236, 238, 240, 242, 244, 246, 248, 250, 252, 254, 256, 258, 260, 262, 264, 266, 268, 270, 272, 274, 276, 278, 280, 282, 284, 286, 288, 290, 292, 294, 296, 298, 300, 302, 304, 306, 308, 310, 312, 314, 316, 318, 320, 322, 324, 326, 328, 330, 332, 334, 336, 338, 340, 342, 344, 346, 348, 350, 352, 354, 356, 358, 360, 362, 364, 366, 368, 370, 372, 374, 376, 378, 380, 382, 384, 386, 388, 390, 392, 394, 396, 398, 400, 402, 404, 406, 408, 410, 412, 414, 416, 418, 420, 422, 424, 426, 428, 430, 432, 434, 436, 438, 440, 442, 444, 446, 448, 450, 452, 454, 456, 458, 460, 462, 464, 466, 468, 470, 472, 474, 476, 478, 480, 482, 484, 486, 488, 490, 492, 494, 496, 498, 500, 502, 504, 506, 508, 510, 512, 514, 516, 518, 520, 522, 524, 526, 528, 530, 532, 534, 536, 538, 540, 542, 544, 546, 548, 550, 552, 554, 556, 558, 560, 562, 564, 568, 570, 572, 574, 576, 578, 580, 582, 584, 586, 588, 590, 592, 594, 596, 598, 600, 602, 604, 606, 608, 610, 612, 614, 616, 618, 620, 622, 624, 626, 628, 630, 632, 634, 636, 638, 640, 642, 644, 646, 648, 650, 652, 654, 656, 658, 660, 662, 664, 666, 668, 670, 672, 674, 676, 678, 680, 682, 684, 686, 688, 690, 692, 694, 696, 698, 700, 702, 704, 706, 708, 710, 712, 714, 716, 718, 720, 722, 724, 726, 728, 730, 732, 734, 736, 738, 740, 742, 744, 746, 748, 750, 752, 754, 756, 758, 760, 762, 764, 766, 768, 770, 772, 774, 776, 778, 780, 782, 784, 786, 788, 790, 792, 794, 796, 798, 800, 802, 804, 806, 808, 810, 812, 814, 816, 818, 820, 822, or 824. In some embodiments, the amino acid sequence of the engineered RNase inhibitor optionally includes 1, 2, 3, 4, 5, 6, 7, 8, 9, or up to 10 substitutions, insertions, and/or deletions. In some embodiments, the amino acid sequence of the engineered RNase inhibitor optionally includes 1, 2, 3, 4, 5, 6, 7, 8, 9, or up to 10 substitutions. In some embodiments, the amino acid sequence of the engineered RNase inhibitor optionally includes 1, 2, 3, 4, or 5 substitutions, insertions, and/or deletions. In some embodiments, the amino acid sequence of the engineered RNase inhibitor optionally includes 1, 2, 3, 4, or 5 substitutions.

[0240] In some embodiments, the engineered RNase inhibitor comprises an amino acid sequence comprising residues 13 to 468 of SEQ ID NO: 36, 238, 320, 360, 442, or 578, or an amino acid sequence comprising SEQ ID NO: 36, 238, 320, 360, 442, or 578. In some embodiments, the amino acid sequence of the engineered RNase inhibitor optionally includes 1, 2, 3, 4, 5, 6, 7, 8, 9, or up to 10 substitutions, insertions, and/or deletions. In some embodiments, the amino acid sequence of the engineered RNase inhibitor optionally includes 1, 2, 3, 4, 5, 6, 7, 8, 9, or up to 10 substitutions. In some embodiments, the amino acid sequence of the engineered RNase inhibitor optionally includes 1, 2, 3, 4, or 5 substitutions, insertions, and/or deletions. In some embodiments, the amino acid sequence of the engineered RNase inhibitor optionally includes 1, 2, 3, 4, or 5 substitutions.

[0241] In some of the foregoing embodiments, the engineered RNase inhibitor polypeptide has 1, 2, 3, 4, or up to 5 substitutions in the amino acid sequence. In some embodiments, the engineered RNase inhibitor polypeptide has 1, 2, 3, or 4 substitutions in the amino acid sequence. In some embodiments, the substitutions comprises non-conservative or conservative substitutions. In some embodiments, the substitutions comprises conservative substitutions. In some embodiments, the substitutions comprises non-conservative substitutions. In some embodiments, guidance on non-conservative and conservative substitutions are provided by the variants disclosed herein.

[0242] In some embodiments, the engineered RNase inhibitor of the present disclosure has RNase inhibitory activity, particularly with one or more of an improved or enhanced property described herein. In some embodiments, the engineered RNase inhibitor has at least one improved or enhanced properties as compared to a reference RNase inhibitor.

[0243] In some embodiments, the engineered RNase inhibitor displays increased RNase inhibitory activity, particularly inhibitory activity against RNase A, as compared to a reference RNase inhibitor. In some embodiments, the engineered RNase inhibitor displays at least 1.05 fold, 1.1 fold, 1.15 fold, 1.2 fold, 1.3 fold, 1.4 fold, 1.5 fold, 1.6 fold, 1.8 fold, 2 fold, 3 fold, 4 fold, 5 fold, 6 fold, 7 fold, 8 fold, 9 fold, 10 fold, or more increase in inhibitory activity as compared to the reference RNase inhibitor.

[0244] In some embodiments, the engineered RNase inhibitor displays increased stability as compared to a reference RNasse inhibitor. In some embodiments, the engineered RNase inhibitor displays increased pH stability as compared to a reference RNase inhibitor.

[0245] In some embodiments, the engineered RNase inhibitor displays increased thermostability as compared to a reference RNasse inhibitor. In some embodiments, the engineered RNase inhibitor shows increased thermostabiltiy at temperature 40° C. or greater, 45° C. or greater, 50° C. or greater, 55° C. or greater, 60° C. or greater, 65° C. or greater, or 70° C. or greater, up to 75° C., as compared to a reference RNase inhibitor. In some embodiments, the engineered RNase inhibitor displays increased thermostability at a temperature range of 50° C. to 75° C. as compared to a reference RNase inhibitor.

[0246] In some embodiments, the engineered RNase inhibitor displays increased resistance to oxidation compared to a reference RNase inhibitor. In some embodiments, the resistance to oxidation is in presence of hydrogen peroxide. In some embodiments, the engineered RNase inhibitor maintains activity in the absence of a reducing agent, such as DTT.

[0247] In some embodiments, the engineered RNase inhibitor displays increased expression as soluble protein as compared to a reference RNase inhibitor.

[0248] In some embodiments, the reference RNase inhibitor has the sequence corresponding to residues 13 to 468 of SEQ ID NO: 2, 36, 238, 320, 360, 442, or 578, or the sequence corresponding to SEQ ID NO: 2, 36, 238, 320, 360, 442, or 578. In some embodiments, the reference RNase inhibitor has the sequence corresponding to residues 13 to 468 of SEQ ID NO: 2, or the sequence corresponding to SEQ ID NO: 2.

[0249] In some embodiments, the engineered RNase inhibitor has one or more improved property selected from i) increased inhibitory activity against RNase A, ii) increased stability, iii) increased thermostability, iv) increased resistance to oxidation, and v) increased expression as soluble protein, or any combination of i), ii), iii), iv) and v), as compared to a reference RNase inhibitor. In some embodiments, the reference RNase inhibitor has the sequence corresponding to residues 13 to 468 of SEQ ID NO: 2, 36, 238, 320, 360, 442, or 578, or the sequence corresponding to SEQ ID NO: 2, 36, 238, 320, 360, 442, or 578. In some embodiments, the reference RNase inhibitor has the sequence corresponding to residues 13 to 468 of SEQ ID NO: 2, or the sequence corresponding to SEQ ID NO: 2.

[0250] In some embodiments, the present disclosure further provides an engineered RNase inhibitor comprising an amino acid sequence having at least 70%, 75%, 80%, 81%, 82%, 83%, 84%, 85%, 86%, 87%, 88%, 89%, 90%, 91%, 92%, 93%, 94%, 95%, 96%, 97%, 98%, 99%, or more sequence identity to the reference sequence corresponding to
[0251] (a) residues 12 to 467 of SEQ ID NO: 4; residues 12 to 467 of SEQ ID NO: 6; residues 12 to 472 of SEQ ID NO: 8; residues 12 to 467 of SEQ ID NO: 10; residues 12 to 472 of SEQ ID NO: 12; residues 12 to 467 of SEQ ID NO: 14; residues 12 to 467 of SEQ ID NO: 16; residues 12 to 471 of SEQ ID NO: 18; residues 12 to 467 of SEQ ID NO: 20; residues 12 to 467 of SEQ ID NO: 22; or residues 12 to 467 of SEQ ID NO: 24; or
[0252] (b) SEQ ID NO: 2, 4, 6, 8, 10, 12, 14, 16, 18, 20, 22, or 24.

[0253] In some embodiments, the engineered RNase inhibitor comprises an amino acid sequence comprising:
[0254] (a) residues 12 to 467 of SEQ ID NO: 4; residues 12 to 467 of SEQ ID NO: 6; residues 12 to 472 of SEQ ID NO: 8; residues 12 to 467 of SEQ ID NO: 10; residues 12 to 472 of SEQ ID NO: 12; residues 12 to 467 of SEQ ID NO: 14; residues 12 to 467 of SEQ ID NO: 16; residues 12 to 471 of SEQ ID NO: 18; residues 12 to 467 of SEQ ID NO: 20; residues 12 to 467 of SEQ ID NO: 22; or residues 12 to 467 of SEQ ID NO: 24; or
[0255] (b) SEQ ID NO: 2, 4, 6, 8, 10, 12, 14, 16, 18, 20, 22, or 24.

[0256] In some embodiments, the engineered RNase inhibitor is expressed as a fusion protein. In some embodiments, the engineered RNase inhibitor described herein can be fused to a variety of polypeptide sequences, such as, by way of example and not limitation, polypeptide tags that can be used for detection and/or purification. In some embodiments, the fusion protein of the engineered RNase inhibitor comprises a glycine-histidine or histidine-tag (His-tag). In some embodiments, the fusion protein of the engineered RNase inhibitor comprises an epitope tag, such as c-myc, FLAG, V5, or hemagglutinin (HA). In some embodiments, the fusion protein of the engineered RNase inhibitor comprises a GST, SUMO, Strep, MBP, or GFP tag. In some embodiments, the fusion is to the amino (N—) terminus of engineered RNase inhibitor polypeptide. In some embodiments, the fusion is to the carboxy (C—) terminus of the engineered RNase inhibitor polypeptide.

[0257] In some embodiments, the engineered RNase inhibitor polypeptide described herein is an isolated composition. In some embodiments, the engineered RNase inhibitor polypeptide is purified, as further discussed herein.

[0258] In some embodiments, the present disclosure further provides functional fragments or biologically active fragments of engineered RNase inhibitor polypeptides described herein. Thus, for each and every embodiment herein of an engineered RNase inhibitor, a functional fragment or biologically active fragment of the engineered RNase inhibitor is provided herewith. In some embodiments, a functional fragment or biologically active fragments of an engineered RNase inhibitor comprises at least about 90%, at least about 95%, at least about 96%, at least about 97%, at least about 98%, or at least about 99% of the activity of the RNase inhibitor polypeptide from which it was derived (i.e., the parent RNase inhibitor). In some embodiments, functional fragments or biologically active fragments comprise at least 90%, 91%, 92%, 93%, 94%, 95%, 96%, 97%, 98%, or 99% of the parent sequence of the RNase inhibitor. In some embodiments, the functional fragment will be truncated by less than 5, less than 10, less than 15, less than 10, less than 25, less than 30, less than 35, less than 40, less than 45, less than 50 amino acids, less than 55 amino acids, less than 60 amino acids, less than 65 amino acids, or less than 70 amino acids.

[0259] In some embodiments, a functional fragment of an engineered RNase inhibitor herein comprises at least 70%, 75%, 80%, 81%, 82%, 83%, 84%, 85%, 90%, 91%, 92%, 93%, 94%, 95%, 96%, 97%, 98%, or 99% of the parent sequence of the engineered RNase inhibitor. In some embodiments, the functional fragment will be truncated by less than 5, less than 10, less than 15, less than 10, less than 25, less than 30, less than 35, less than 40, less than 45, less than 50, less than 55, less than 60, less than 65, or less than 70 amino acids.

[0260] In some embodiments, the functional fragments or biologically active fragments of the engineered RNase inhibitor polypeptide described herein include at least a mutation or mutation set in the amino acid sequence of the engineered RNase inhibitor described herein. Accordingly, in some embodiments, the functional fragments or biologically active fragments of the engineered RNase inhibitor displays the enhanced or improved property associated with the mutation or mutation set in the parent RNase inhibitor.

### Polynucleotides Encoding Engineered Polypeptides, Expression Vectors and Host Cells

[0261] In another aspect, the present disclosure provides recombinant polynucleotides encoding the engineered RNase inhibitor described herein. In some embodiments, the recombinant polynucleotides are operably linked to one or more heterologous regulatory sequences that control gene expression to create a recombinant polynucleotide construct capable of expressing the engineered RNase inhibitor. In some embodiments, an expression construct containing at least one heterologous polynucleotide encoding the engineered RNase inhibitor polypeptide(s) is introduced into appropriate host cells to express the corresponding RNase inhibitor polypeptide(s).

[0262] As will be apparent to the skilled artisan, availability of a protein sequence and the knowledge of the codons corresponding to the various amino acids provide a description of all the polynucleotides capable of encoding the subject polypeptides. The degeneracy of the genetic code, where the same amino acids are encoded by alternative or synonymous codons, allows an extremely large number of nucleic acids to be made, all of which encode an engineered RNase inhibitor of the present disclosure. Thus, the present disclosure provides methods and compositions for the production of each and every possible variation of polynucleotides that could be made that encode the engineered RNase inhibitor polypeptides described herein by selecting combinations based on the possible codon choices, and all such polynucleotide sequence variations are to be considered specifically disclosed for any polypeptide described herein, including the amino acid sequences presented in the Examples (e.g., in Tables 8.1, 9.1, 9.2, 10.1, 11.1, 12.1, 12.2, 13.1, 13.2, 14.1, 14.2, and the Appendix) and in the Sequence Listing.

[0263] In some embodiments, the codons are preferably optimized for utilization by the chosen host cell for protein production. In some embodiments, preferred codons in bacteria are used for expression in bacteria. In some embodiments, preferred codons in fungal cells are used for expression in fungal cells. In some embodiments, preferred codons in insect cells are used for expression in insect cells. In some embodiments, preferred codons in mammalian cells are used for expression in mammalian cells. In some embodiments, codon optimized polynucleotides encoding an engineered RNase inhibitor polypeptide described herein contain preferred codons at about 40%, 50%, 60%, 70%, 80%, 90%, or greater than 90% of the codon positions in the full-length coding region.

[0264] Accordingly, in some embodiments, a recombinant polynucleotide of the present disclosure comprises a polynucleotide sequence encoding an engineered RNase inhibitor polypeptides described herein. In some embodiments, the polynucleotide sequence of the recombinant polynucleotide is codon optimized.

[0265] In some embodiments, the recombinant polynucleotide comprises a polynucleotide sequence encoding an engineered RNase inhibitor comprising an amino acid sequence having at least 70%, 75%, 80%, 81%, 82%, 83%, 84%, 85%, 86%, 87%, 88%, 89%, 90%, 91%, 92%, 93%, 94%, 95%, 96%, 97%, 98%, 99%, or more sequence identity to a reference sequence corresponding to residues 13 to 468 of an even numbered SEQ ID NO. of SEQ ID NOs: 2 and 26-824, or to a reference sequence corresponding to an even numbered SEQ ID NO. of SEQ ID NOs: 2 and 26-824, wherein the amino acid sequence comprises one or more substitutions relative to the reference sequence corresponding to residues 13 to 468 of SEQ ID NO: 2, 36, 238, 320, 360, 442, or 578, or relative to the reference sequence corresponding to SEQ ID NO: 2, 36, 238, 320, 360, 442, or 578.

[0266] In some embodiments, the recombinant polynucleotide comprises a polynucleotide sequence encoding an engineered RNase inhibitor comprising an amino acid sequence having at least 70%, 75%, 80%, 81%, 82%, 83%, 84%, 85%, 86%, 87%, 88%, 89%, 90%, 91%, 92%, 93%, 94%, 95%, 96%, 97%, 98%, 99%, or more sequence identity to a reference sequence corresponding to residues 13 to 468 of SEQ ID NO: 2, 36, 238, 320, 360, 442, or 578, or to a reference sequence corresponding to SEQ ID NO: 2, 36, 238, 320, 360, 442, or 578, wherein the amino acid sequence comprises one or more substitutions relative to the reference sequence corresponding to residues 13 to 468 of SEQ ID NO: 2, 36, 238, 320, 360, 442, or 578, or to the reference sequence corresponding to SEQ ID NO: 2, 36, 238, 320, 360, 442, or 578.

[0267] In some embodiments, the recombinant polynucleotide comprises a polynucleotide sequence encoding an engineered RNase inhibitor comprising an amino acid sequence having at least 70%, 75%, 80%, 81%, 82%, 83%, 84%, 85%, 86%, 87%, 88%, 89%, 90%, 91%, 92%, 93%, 94%, 95%, 96%, 97%, 98%, 99%, or more sequence identity to the reference sequence corresponding to residues 13 to 468 of SEQ ID NO: 2, or to the reference sequence corresponding to SEQ ID NO: 2, wherein the amino acid sequence comprises one or more substitutions relative to the reference sequence corresponding to residues 13 to 468 of SEQ ID NO: 2, or relative to the reference sequence corresponding to SEQ ID NO: 2.

[0268] In some embodiments, the recombinant polynucleotide comprises a polynucleotide sequence encoding an engineered RNase inhibitor comprising an amino acid sequence having at least 70%, 75%, 80%, 81%, 82%, 83%, 84%, 85%, 86%, 87%, 88%, 89%, 90%, 91%, 92%, 93%, 94%, 95%, 96%, 97%, 98%, 99%, or more sequence identity to the reference sequence corresponding to residues 13 to 468 of SEQ ID NO: 36, 238, 320, 360, 442, or 578, or to the reference sequence corresponding to SEQ ID NO: 36, 238, 320, 360, 442, or 578, wherein the amino acid sequence comprises one or more substitutions relative to the reference sequence corresponding to residues 13 to 468 of SEQ ID NO: 2, or relative to the reference sequence corresponding to SEQ ID NO: 2.

[0269] In some embodiments, the recombinant polynucleotide comprises a polynucleotide sequence encoding an engineered RNase inhibitor comprising an amino acid sequence having at least 70%, 75%, 80%, 81%, 82%, 83%, 84%, 85%, 86%, 87%, 88%, 89%, 90%, 91%, 92%, 93%, 94%, 95%, 96%, 97%, 98%, 99% or more sequence identity to a reference sequence corresponding to residues 13 to 468 of an even numbered SEQ ID NO. of SEQ ID NOs: 26-824, or to a reference sequence corresponding to an even numbered SEQ ID NO. of SEQ ID NOs: 26-824, wherein the amino acid sequence comprises one or more substitutions relative to the reference sequence corresponding to residues 13 to 468 of SEQ ID NO: 2, or relative to the reference sequence corresponding to SEQ ID NO: 2.

[0270] In some embodiments, the recombinant polynucleotide comprises a polynucleotide sequence encoding an engineered RNase inhibitor comprising an amino acid sequence having at least 70%, 75%, 80%, 81%, 82%, 83%, 84%, 85%, 86%, 87%, 88%, 89%, 90%, 91%, 92%, 93%, 94%, 95%, 96%, 97%, 98%, 99% or more sequence identity to a reference sequence corresponding to residues 13 to 468 of an even numbered SEQ ID NO. of SEQ ID NOs: 26-142, or to a reference sequence corresponding to an even numbered SEQ ID NO. of SEQ ID NOs: 26-142, wherein the amino acid sequence comprises one or more substitutions relative to the reference sequence corresponding to residues 13 to 468 of SEQ ID NO: 2, or relative to the reference sequence corresponding to SEQ ID NO: 2.

[0271] In some embodiments, the recombinant polynucleotide comprises a polynucleotide sequence encoding an engineered RNase inhibitor comprising an amino acid sequence comprising at least a substitution at amino acid position 2, 12, 13, 15, 28, 35, 37, 38, 40, 50, 51, 56, 57, 60, 64, 66, 78, 81, 83, 84, 90, 91, 94, 95, 107, 113, 118, 121, 124, 126, 135, 137, 138, 142, 145, 147, 148, 150, 156, 158, 167, 168, 173, 175, 176, 177, 178, 203, 205, 221, 228, 230, 237, 243, 257, 260, 265, 267, 272, 285, 291, 296, 317, 319, 323, 326, 332, 338, 341, 342, 345, 348, 351, 363, 367, 373, 377, 385, 386, 390, 395, 396, 400, 417, 419, 422, 429, 430, 452, 453, 459, or 466, or combinations thereof, wherein the amino acid positions are relative to the reference sequence corresponding to residues 13 to 468 of SEQ ID NO: 2, or relative to the reference sequence corresponding to SEQ ID NO: 2.

[0272] In some embodiments, the recombinant polynucleotide comprises a polynucleotide sequence encoding an engineered RNase inhibitor comprising an amino acid sequence comprising at least a substitution at amino acid position 50, 64, 81, 90, 95, 107, 113, 124, 142, 145, 147, 148, 176, 203, 205, 228, 243, 257, 272, 285, 291, 296, 319, 323, 342, 348, 390, 395, 452, 453, or 459, or combinations thereof, wherein the amino acid positions are relative to the reference sequence corresponding to residues 13 to 468 of SEQ ID NO: 2, or relative to the reference sequence corresponding to SEQ ID NO: 2.

[0273] In some embodiments, the recombinant polynucleotide comprises a polynucleotide sequence encoding an engineered RNase inhibitor comprising an amino acid sequence comprising at least a mutation at position 95, 296, or 459, or combinations thereof, wherein the amino acid positions are relative to the reference sequence corresponding to residues 13 to 468 of SEQ ID NO: 2, or relative to the reference sequence corresponding to SEQ ID NO: 2.

[0274] In some embodiments, the recombinant polynucleotide comprises a polynucleotide sequence encoding an engineered RNase inhibitor comprising an amino acid sequence comprising at least a substitution or substitution set at amino acid position(s) 257/459, 345, 257, 296, 113, 95/296/459, 95/257/296, 453, 107/267, 417/422/459, 395, 390, 257/296, 243, 156/257, 351, 348, 363, 95/257/296/422, 83/107/230/267/429, 107/429, 107/323/429, 94/121/265/390, 400, 429, or 81, wherein the amino acid positions are relative to the reference sequence corresponding to residues 13 to 468 of SEQ ID NO: 2, or relative to the reference sequence corresponding to SEQ ID NO: 2.

[0275] In some embodiments, the recombinant polynucleotide comprises a polynucleotide sequence encoding an RNase inhibitor comprising an amino acid sequence comprising at least a substitution at an amino acid position provided in Tables 8.1, 9.1, 9.2, 10.1, 11.1, 12.1, 12.2, 13.1, 13.2, 14.1, 14.2, and the Appendix, wherein the amino acid positions are relative to the reference sequence corresponding to residues 13 to 468 of SEQ ID NO: 2, or relative to the reference sequence corresponding to SEQ ID NO: 2.

[0276] In some embodiments, the recombinant polynucleotide comprises a polynucleotide sequence encoding an RNase inhibitor comprising an amino acid sequence comprising at least one substitution provided in Tables 8.1, 9.1, 9.2, 10.1, 11.1, 12.1, 12.2, 13.1, 13.2, 14.1, 14.2, and the Appendix, wherein the amino acid positions are relative to the reference sequence corresponding to residues 13 to 468 of SEQ ID NO: 2, or relative to the reference sequence corresponding to SEQ ID NO: 2.

[0277] In some embodiments, the recombinant polynucleotide comprises a polynucleotide sequence encoding an RNase inhibitor comprising an amino acid sequence comprising at least a substitution or substitution set at the amino acid position(s) provided in Tables 8.1, 9.1, 9.2, 10.1, 11.1, 12.1, 12.2, 13.1, 13.2, 14.1, 14.2, and the Appendix, wherein the amino acid positions are relative to the reference sequence corresponding to residues 13 to 468 of SEQ ID NO: 2, or relative to the reference sequence corresponding to SEQ ID NO: 2.

[0278] In some embodiments, the recombinant polynucleotide comprises a polynucleotide sequence encoding an RNase inhibitor comprising an amino acid sequence comprising at least a substitution or substitution set of an RNase inhibitor variant provided in Tables 8.1, 9.1, 9.2, 10.1, 11.1, 12.1, 12.2, 13.1, 13.2, 14.1, 14.2, and the Appendix, wherein the amino acid positions are relative to the reference sequence corresponding to residues 13 to 468 of SEQ ID NO: 2, or relative to the reference sequence corresponding to SEQ ID NO: 2.

[0279] In some embodiments, the recombinant polynucleotide comprises a polynucleotide sequence encoding an engineered RNase inhibitor comprising an amino acid sequence having at least 70%, 75%, 80%, 81%, 82%, 83%, 84%, 85%, 86%, 87%, 88%, 89%, 90%, 91%, 92%, 93%, 94%, 95%, 96%, 97%, 98%, 99%, or more sequence identity to the reference sequence corresponding to residues 13 to 468 of SEQ ID NO: 36, 238, 320, 360, 442, or 578, or to the reference sequence corresponding to SEQ ID NO: 36, 238, 320, 360, 442, or 578.

[0280] In some embodiments, the recombinant polynucleotide comprises a polynucleotide sequence encoding an engineered RNase inhibitor comprising an amino acid sequence having at least 70%, 75%, 80%, 81%, 82%, 83%, 84%, 85%, 86%, 87%, 88%, 89%, 90%, 91%, 92%, 93%, 94%, 95%, 96%, 97%, 98%, 99% or more sequence identity to a reference sequence corresponding to residues 13 to 468 of an even numbered SEQ ID NO. of SEQ ID NOs: 26-824, or to a reference sequence corresponding to an even numbered SEQ ID NO. of SEQ ID NOs: 26-824.

[0281] In some embodiments, the recombinant polynucleotide comprises a polynucleotide sequence encoding an engineered RNase inhibitor comprising an amino acid sequence having at least 70%, 75%, 80%, 81%, 82%, 83%, 84%, 85%, 86%, 87%, 88%, 89%, 90%, 91%, 92%, 93%, 94%, 95%, 96%, 97%, 98%, 99%, or more sequence identity to the reference sequence corresponding to residues 13 to 468 of SEQ ID NO: 36, 238, 320, 360, 442, or 578, or to the reference sequence corresponding to SEQ ID NO: 36, 238, 320, 360, 442, or 578, wherein the amino acid sequence comprises one or more substitutions relative to the reference sequence corresponding to residues 13 to 468 of SEQ ID NO: 36, 238, 320, 360, 442, or 578, or relative to the reference sequence corresponding to SEQ ID NO: 36, 238, 320, 360, 442, or 578.

[0282] In some embodiments, the recombinant polynucleotide comprises a polynucleotide sequence encoding an engineered RNase inhibitor comprising an amino acid sequence having at least 70%, 75%, 80%, 81%, 82%, 83%, 84%, 85%, 86%, 87%, 88%, 89%, 90%, 91%, 92%, 93%, 94%, 95%, 96%, 97%, 98%, 99% or more sequence identity to a reference sequence corresponding to residues 13 to 468 of an even numbered SEQ ID NO. of SEQ ID NOs: 26-824, or to a reference sequence corresponding to an even numbered SEQ ID NO. of SEQ ID NOs: 26-824, wherein the amino acid sequence comprises one or more substitutions relative to the reference sequence corresponding to residues 13 to 468 of SEQ ID NO: 36, 238, 320, 360, 442, or 578, or relative to the reference sequence corresponding to SEQ ID NO: 36, 238, 320, 360, 442, or 578.

[0283] In some embodiments, the recombinant polynucleotide comprises a polynucleotide sequence encoding an engineered RNase inhibitor comprising an amino acid sequence comprising at least a substitution at amino acid position 12, 13, 15, 28, 35, 37, 38, 40, 50, 51, 56, 57, 60, 64, 66, 78, 81, 83, 84, 90, 91, 94, 95, 107, 113, 118, 121, 124, 126, 135, 137, 138, 142, 145, 147, 148, 150, 156, 158, 167, 168, 173, 175, 176, 177, 178, 203, 205, 221, 228, 230, 237, 243, 257, 260, 265, 267, 272, 285, 291, 296, 317, 319, 323, 326, 332, 338, 341, 342, 345, 348, 351, 363, 367, 373, 377, 385, 386, 390, 395, 396, 400, 417, 419, 422, 429, 430, 452, 453, 459, or 466, or combinations thereof, wherein the amino acid positions are relative to the reference sequence corresponding to residues 13 to 468 of SEQ ID NO: 36, 238, 320, 360, 442, or 578, or relative to the reference sequence corresponding to SEQ ID NO: 36, 238, 320, 360, 442, or 578.

[0284] In some embodiments, the recombinant polynucleotide comprises a polynucleotide sequence encoding an engineered RNase inhibitor comprising an amino acid sequence comprising at least a substitution at amino acid position 50, 64, 81, 90, 95, 107, 113, 124, 142, 145, 147, 148, 176, 203, 205, 228, 243, 257, 272, 285, 291, 296, 319, 323, 342, 348, 390, 395, 452, 453, or 459, or combinations thereof, wherein the amino acid positions are relative to the reference sequence corresponding to residues 13 to 468 of SEQ ID NO: 36, 238, 320, 360, 442, or 578, or relative to the reference sequence corresponding to SEQ ID NO: 36, 238, 320, 360, 442, or 578.

[0285] In some embodiments, the recombinant polynucleotide comprises a polynucleotide sequence encoding an engineered RNase inhibitor comprising an amino acid sequence comprising at least a substitution at amino acid position 95, 296, or 459, or combinations thereof, wherein the amino acid positions are relative to the reference sequence corresponding to residues 13 to 468 of SEQ ID NO: 36, 238, 320, 360, 442, or 578, or relative to the reference sequence corresponding to SEQ ID NO: 36, 238, 320, 360, 442, or 578.

[0286] In some embodiments, the recombinant polynucleotide comprises a polynucleotide sequence encoding an engineered RNase inhibitor comprising an amino acid sequence having at least 70%, 75%, 80%, 81%, 82%, 83%, 84%, 85%, 86%, 87%, 88%, 89%, 90%, 91%, 92%, 93%, 94%, 95%, 96%, 97%, 98%, 99%, or more sequence identity to the reference sequence corresponding to residues 13 to 468 of SEQ ID NO: 36, or to the reference sequence corresponding to SEQ ID NO: 36, wherein the amino acid sequence comprises one or more substitutions relative to the reference sequence corresponding to residues 13 to 468 of SEQ ID NO: 36, or relative to the reference sequence corresponding to SEQ ID NO: 36.

[0287] In some embodiments, the recombinant polynucleotide comprises a polynucleotide sequence encoding an engineered RNase inhibitor comprising an amino acid sequence having at least 70%, 75%, 80%, 81%, 82%, 83%, 84%, 85%, 86%, 87%, 88%, 89%, 90%, 91%, 92%, 93%, 94%, 95%, 96%, 97%, 98%, 99%, or more sequence identity to the reference sequence corresponding to residues 13 to 468 of an even-numbered SEQ ID NO. of SEQ ID NOs: 144-316, or to the reference sequence corresponding to an even-numbered SEQ ID NO. of SEQ ID NOs: 144-316, wherein the amino acid sequence comprises one or more substitutions relative to the reference sequence corresponding to residues 13 to 468 of SEQ ID NO: 36, or relative to the reference sequence corresponding to SEQ ID NO: 36.

[0288] In some embodiments, the recombinant polynucleotide comprises a polynucleotide sequence encoding an engineered RNase inhibitor comprising an amino acid sequence comprising at least a substitution or substitution set at amino acid position(s) 323/390/429, 257/323/429, 257/390, 257/323/390, 257/323/390/429, 257/429, 257/377/390, 135/257/323/377/390, 323/377/390/429, 257/323/377/390, 257/377/429, 158/257/323/377/390, 257/323/377/429, 167/257/323/390/429, 377/390/429, 377/390, 257/323/377/390/429, 257/377, 390/429, 257/377/390/429, 257/390/429, 390, 243/363/390, 113/257/351/363/429, 113/257/351/390/430, 113/257/272/390, 113/243/351/390/429, 257/272/345/348, 243/257/351/390, 113/243/257/272/390, 257/272/363/390/430, 257/351/390, 113/243/390/430, 113/257/267/351/363/400/430, 113/243/257/351/430, 243/267/341/390/395, 113/243/257/345/348, 113/243/257/348/390, 243/345/348/390, 113/243/257/345/430, 257/345/348/351/390/429/430, 272/345/390/429/430, 243/267/351, 243/272/345/390, 113/257/363/390, 243/390/429, 113/243/257/351/390, 113/243/272/345/348/430, 243/267/272/348/390, 113/257/272/345/348/363/430, 113/243/390/429/430, 113/243/257/272/351/363, 243/272/345/348/363/390/395, 113/243/272/351/363/390/395, 113/243/257/272/345/390/430, 113/243/267/272/363/390/430, 113/243/267/348/363/430, 113/243/257/351/390/430, 113/243/257/272/351/390, 113/243/267/390/430, 243/257/348/395/430, 243/345/348/429/430, 243/257/345/348/395, 243/257/272/351/400/429, 113/243/267, 113/390/430, 243/267/351/400, or 429/430, wherein the amino acid positions are relative to the reference sequence corresponding to residues 13 to 468 of SEQ ID NO: 36, or relative to the reference sequence corresponding to SEQ ID NO: 36.

[0289] In some embodiments, the recombinant polynucleotide comprises a polynucleotide sequence encoding an engineered RNase inhibitor comprising an amino acid sequence having at least 70%, 75%, 80%, 81%, 82%, 83%, 84%, 85%, 86%, 87%, 88%, 89%, 90%, 91%, 92%, 93%, 94%, 95%, 96%, 97%, 98%, 99%, or more sequence identity to the reference sequence corresponding to residues 13 to 468 of SEQ ID NO: 238, or to the reference sequence corresponding to SEQ ID NO: 238, wherein the amino acid sequence comprises one or more substitutions relative to the reference sequence corresponding to residues 13 to 468 of SEQ ID NO: 238, or relative to the reference sequence corresponding to SEQ ID NO: 238.

[0290] In some embodiments, the recombinant polynucleotide comprises a polynucleotide sequence encoding an engineered RNase inhibitor comprising an amino acid sequence having at least 70%, 75%, 80%, 81%, 82%, 83%, 84%, 85%, 86%, 87%, 88%, 89%, 90%, 91%, 92%, 93%, 94%, 95%, 96%, 97%, 98%, 99%, or more sequence identity to the reference sequence corresponding to residues 13 to 468 of an even-numbered SEQ ID NO. of SEQ ID NOs: 318-352, or to the reference sequence corresponding to an even-numbered SEQ ID NO. of SEQ ID NOs: 318-352, wherein the amino acid sequence comprises one or more substitutions relative to the reference sequence corresponding to residues 13 to 468 of SEQ ID NO: 238, or relative to the reference sequence corresponding to SEQ ID NO: 238.

[0291] In some embodiments, the recombinant polynucleotide comprises a polynucleotide sequence encoding an engineered RNase inhibitor comprising an amino acid sequence comprising at least a substitution or substitution set at amino acid position(s) 323/453, 323/348/452, 452/453, 323/351/430/452/453, 291, 145, 228, 323/429, 38, 150, 12, 173, 38/237, or 40, wherein the amino acid positions are relative to the reference sequence corresponding to residues 13 to 468 of SEQ ID NO: 238, or relative to the reference sequence corresponding to SEQ ID NO: 238.

[0292] In some embodiments, the recombinant polynucleotide comprises a polynucleotide sequence encoding an engineered RNase inhibitor comprising an amino acid sequence having at least 70%, 75%, 80%, 81%, 82%, 83%, 84%, 85%, 86%, 87%, 88%, 89%, 90%, 91%, 92%, 93%, 94%, 95%, 96%, 97%, 98%, 99%, or more sequence identity to the reference sequence corresponding to residues 13 to 468 of SEQ ID NO: 320, or to the reference sequence corresponding to SEQ ID NO: 320, wherein the amino acid sequence comprises one or more substitutions relative to the reference sequence corresponding to residues 13 to 468 of SEQ ID NO: 320, or relative to the reference sequence corresponding to SEQ ID NO: 320.

[0293] In some embodiments, the recombinant polynucleotide comprises a polynucleotide sequence encoding an engineered RNase inhibitor comprising an amino acid sequence having at least 70%, 75%, 80%, 81%, 82%, 83%, 84%, 85%, 86%, 87%, 88%, 89%, 90%, 91%, 92%, 93%, 94%, 95%, 96%, 97%, 98%, 99%, or more sequence identity to the reference sequence corresponding to residues 13 to 468 of an even-numbered SEQ ID NO. of SEQ ID NOs: 354-390, or to the reference sequence corresponding to an even-numbered SEQ ID NO. of SEQ ID NOs: 354-390, wherein the amino acid sequence comprises one or more substitutions relative to the reference sequence corresponding to residues 13 to 468 of SEQ ID NO: 320, or relative to the reference sequence corresponding to SEQ ID NO: 320.

[0294] In some embodiments, the recombinant polynucleotide comprises a polynucleotide sequence encoding an engineered RNase inhibitor comprising an amino acid sequence comprising at least a substitution or substitution set at amino acid position(s) 13/145/228/291/348/351, 453, 12/13/453, 145/228/291/453, 13/145/453, 145/291/453, 38/145/453, 12/145/453, 38/145/228/453, 15/28/81/124/221/285/317, 15/28/64/203/221/285/317, 15/57/81/124/148/203, 12/453, 56/57/64/81/91/124/203/285/317, 66/90/142/176/205/319, 228/453, or 145/228/453, wherein the amino acid positions are relative to the reference sequence corresponding to residues 13 to 468 of SEQ ID NO: 320, or relative to the reference sequence corresponding to SEQ ID NO: 320.

[0295] In some embodiments, the recombinant polynucleotide comprises a polynucleotide sequence encoding an engineered RNase inhibitor comprising an amino acid sequence having at least 70%, 75%, 80%, 81%, 82%, 83%, 84%, 85%, 86%, 87%, 88%, 89%, 90%, 91%, 92%, 93%, 94%, 95%, 96%, 97%, 98%, 99%, or more sequence identity to the reference sequence corresponding to residues 13 to 468 of SEQ ID NO: 360, or to the reference sequence corresponding to SEQ ID NO: 360, wherein the amino acid sequence comprises one or more substitutions relative to the reference sequence corresponding to residues 13 to 468 of SEQ ID NO: 360, or relative to the reference sequence corresponding to SEQ ID NO: 360.

[0296] In some embodiments, the recombinant polynucleotide comprises a polynucleotide sequence encoding an engineered RNase inhibitor comprising an amino acid sequence having at least 70%, 75%, 80%, 81%, 82%, 83%, 84%, 85%, 86%, 87%, 88%, 89%, 90%, 91%, 92%, 93%, 94%, 95%, 96%, 97%, 98%, 99%, or more sequence identity to the reference sequence corresponding to residues 13 to 468 of an even-numbered SEQ ID NO. of SEQ ID NOs: 392-554, or to the reference sequence corresponding to an even-numbered SEQ ID NO. of SEQ ID NOs: 392-554, wherein the amino acid sequence comprises one or more substitutions relative to the reference sequence corresponding to residues 13 to 468 of SEQ ID NO: 360, or relative to the reference sequence corresponding to SEQ ID NO: 360.

[0297] In some embodiments, the recombinant polynucleotide comprises a polynucleotide sequence encoding an engineered RNase inhibitor comprising an amino acid sequence comprising at least a substitution or substitution set at amino acid position(s) 319, 37, 60, 342, 81, 50, 395, 64, 177, 107, 373, 205, 35, 78, 228, 178, 285, 37/142/148/203/205/285/319, 50/81/90/124/147/148/203/205/285, 66/90/148/285/317/319, 28/37/91/142/205/285, 50/91/124/142/147/148/203/205/317/319, 50/66/90/91/124/142/285/317, 147/148/203/285/317/319, 50/66/81/90/205/319, 50/66/124/203/205/317/319, 28/66/84/90/91/142/205/319, 37/91/148/205/319, 28/66/81/124/147/285/319, 28/50/66/84/90/147/203/205/317, 28/50/90/91/124/142/319, 37/81/147/148/203/205, 28/66/81/90/91/124/203/285/317/319, 28/50/66/81/90/91/138/147/148/205/285/319, 28/37/50/124/319, 81/90/91/124/285/317, 50/90/142/203/285, 50/90/124/142/205/285/319, 28/66/90/91/147/148/205/319/326, 66/81/319, 28/66/90/203/205/319, 50/66/90/91/205, 50/66/147/205, 37/81/285, 50/66/90/91/319, 50/147/203/285, 37/50/81/148, 28/66/142/319, 15/28/66/81/90/91/147/148/319, 15/28/81/90/91/142/285/317/319, 15/28/37/50/66/124/147/148/205/285, 15/66/81/147/148, 66/91/124/142/147/148, 15/37/66/81/147/148/317/319, 15/50/90/91/124/142/147/285/317/319, 15/50/90/91/142/147/148/203/205, 15/28/81/142/147/148/285/317/319, 15/28/50/66/90/91/203/285/319, 15/66/90/91/147/148/205/285, 15/28/90/91/142/147/148/285/317/319, 15/37/91/148/285/319, 81/147/148/203/205, 147/148/285/319, 15/50/90/147/148, 15/66/81/90/285/319, 50/81/147/148/285, 37/147/148/285, 15/37/66/84/90/91/203/285/317, 15/84/90/91/203/285, 37/90/91/147, 90/91/205/317/319, 50/148/203/317, 15/28/50/66/81/84/90/285/317, 15/81/147, or 15/285, wherein the amino acid positions are relative to the reference sequence corresponding to residues 13 to 468 of SEQ ID NO: 360, or relative to the reference sequence corresponding to SEQ ID NO: 360.

[0298] In some embodiments, the recombinant polynucleotide comprises a polynucleotide sequence encoding an engineered RNase inhibitor comprising an amino acid sequence having at least 70%, 75%, 80%, 81%, 82%, 83%, 84%, 85%, 86%, 87%, 88%, 89%, 90%, 91%, 92%, 93%, 94%, 95%, 96%, 97%, 98%, 99%, or more sequence identity to the reference sequence corresponding to residues 13 to 468 of SEQ ID NO: 442, or to the reference sequence corresponding to SEQ ID NO: 442, wherein the amino acid sequence comprises one or more substitutions relative to the reference sequence corresponding to residues 13 to 468 of SEQ ID NO: 442, or relative to the reference sequence corresponding to SEQ ID NO: 442.

[0299] In some embodiments, the recombinant polynucleotide comprises a polynucleotide sequence encoding an engineered RNase inhibitor comprising an amino acid sequence having at least 70%, 75%, 80%, 81%, 82%, 83%, 84%, 85%, 86%, 87%, 88%, 89%, 90%, 91%, 92%, 93%, 94%, 95%, 96%, 97%, 98%, 99%, or more sequence identity to the reference sequence corresponding to residues 13 to 468 of an even-numbered SEQ ID NO. of SEQ ID NOs: 556-724, or to the reference sequence corresponding to an even-numbered SEQ ID NO. of SEQ ID NOs: 556-724, wherein the amino acid sequence comprises one or more substitutions relative to the reference sequence corresponding to residues 13 to 468 of SEQ ID NO: 442, or relative to the reference sequence corresponding to SEQ ID NO: 442.

[0300] In some embodiments, the recombinant polynucleotide comprises a polynucleotide sequence encoding an engineered RNase inhibitor comprising an amino acid sequence comprising at least a substitution or substitution set at amino acid position(s) 78/260,396, 345, 37, 342, 395, 367, 38, 107, 228, 260, 57, 50/51, 338, 285/291/385, 175, 60, 145/147/148, 177, 28, 118, 64, 37/60/142/176/228/291/317, 60/64/317/319/342, 66/228/319/342/395, 37/142/291/317, 64/107/142/291/319/342/395, 37/60/317/319/342/395, 37/60/107/142/176/317/319/342, 142/317/319/342/395, 176/228/319/395, 228/291/342/395, 64/395, 64/107/142/176/228/319/342/395, 60/64/107/142/291/319/342, 37/66/107/291/317, 37/66/107/317/395, 37/228/317/395, 342/395, 66/142/319/342/395, 66/142/228/395, 363, 142/395, 60/64/177/291/395, 66/319, 64/107/177/228/291/317/395, 64/142/177/228/317, 60/228/317/395, 60/64/176/317/342, 177/228/342/395, 64/142/177/317/319, 60/64/107/342, 60/107/142/291/317/342/395, 66/228/319, 64/228/317/319, 168, 319/395, 37/107/228, 66/142, 37/342, 60/64/176/228/395, 60/64/342, 35, 60/66/395, 319, 291/317/319/342/395, 37/177,107, 37/60/64/142/291, 37/60/142/228/291, 60/319/342, 66/176/317/319/395, or 37/177/228, wherein the amino acid positions are relative to the reference sequence corresponding to residues 13 to 468 of SEQ ID NO: 442, or relative to the reference sequence corresponding to SEQ ID NO: 442.

[0301] In some embodiments, the recombinant polynucleotide comprises a polynucleotide sequence encoding an engineered RNase inhibitor comprising an amino acid sequence having at least 70%, 75%, 80%, 81%, 82%, 83%, 84%, 85%, 86%, 87%, 88%, 89%, 90%, 91%, 92%, 93%, 94%, 95%, 96%, 97%, 98%, 99%, or more sequence identity to the reference sequence corresponding to residues 13 to 468 of SEQ ID NO: 578, or to the reference sequence corresponding to SEQ ID NO: 578, wherein the amino acid sequence comprises one or more substitutions relative to the reference sequence corresponding to residues 13 to 468 of SEQ ID NO: 578, or relative to the reference sequence corresponding to SEQ ID NO: 578.

[0302] In some embodiments, the recombinant polynucleotide comprises a polynucleotide sequence encoding an engineered RNase inhibitor comprising an amino acid sequence having at least 70%, 75%, 80%, 81%, 82%, 83%, 84%, 85%, 86%, 87%, 88%, 89%, 90%, 91%, 92%, 93%, 94%, 95%, 96%, 97%, 98%, 99%, or more sequence identity to the reference sequence corresponding to residues 13 to 468 of an even-numbered SEQ ID NO. of SEQ ID NOs: 726-824, or to the reference sequence corresponding to an even-numbered SEQ ID NO. of SEQ ID NOs: 726-824, wherein the amino acid sequence comprises one or more substitutions relative to the reference sequence corresponding to residues 13 to 468 of SEQ ID NO: 578, or relative to the reference sequence corresponding to SEQ ID NO: 578.

[0303] In some embodiments, the recombinant polynucleotide comprises a polynucleotide sequence encoding an engineered RNase inhibitor comprising an amino acid sequence comprising at least a substitution set at amino acid position(s) 28/118/175/260/338/367, 118/168/260/396, 38/60/168/260/338/367, 28/38/57/60/260/363/367, 57/118/260/338/367, 57/118/168/177/260/338/367, 260/396, 28/118/168/260/367/396, 28/260/338, 28/60/168/260, 57/60/118/175/177/260/338, 28/57/260/338/367, 35/260/338/367, 118/175/260/338, 168/260, 57/60/168/177/260/338/367, 28/168/260/338, 260/367, 28/57/137/260, 38/60/175/260/338, 38/60/260/367/396, 57/60/260/363/367, 60/260/367, 28/38/60/260/367, 60/168,260/363/367, 177/260/363/367, 38/260, 28/60/118/177/260, 28/35/60/118/175/260, 60/367, 28/60/118, 57/118,118/260/338/396, 28/38/57/60/118/177/260/338/363/367/396, 28/38/60/260/363/367, 28/35/38/57/118/260/363/367, 28/57/60/168/260/367, 168/175/260/338/367, 57/60/168/260/338/363/367/396, 60/168/363/367/396, 28/38/57/60/118/168/260/367, 28/175/260/367, 60/363/367/396, 260/338/367, 28/57/260/338/363/367, 168/260/367, 367/396, 28/35/175/260/367/396, or 57/60/168/260/367, wherein the amino acid positions are relative to the reference sequence corresponding to residues 13 to 468 of SEQ ID NO: 578, or relative to the reference sequence corresponding to SEQ ID NO: 578.

[0304] In some embodiments, the recombinant polynucleotide comprises a polynucleotide sequence encoding an engineered RNase inhibitor comprising an amino acid sequence comprising at least a substitution at an amino acid position provided in Tables 8.1, 9.1, 9.2, 10.1, 11.1, 12.1, 12.2, 13.1, 13.2, 14.1, and 14.2, wherein the amino acid positions are relative to the reference sequence corresponding to residues 13 to 468 of SEQ ID NO: 36, 238, 320, 360, 442, or 578, or relative to the reference sequence corresponding to SEQ ID NO: 36, 238, 320, 360, 442, or 578.

[0305] In some embodiments, the recombinant polynucleotide comprises a polynucleotide sequence encoding an engineered RNase inhibitor comprising an amino acid sequence comprising at least one substitution provided in Tables 8.1, 9.1, 9.2, 10.1, 11.1, 12.1, 12.2, 13.1, 13.2, 14.1, and 14.2, wherein the amino acid positions are relative to the reference sequence corresponding to residues 13 to 468 of SEQ ID NO: 36, 238, 320, 360, 442, or 578, or relative to the reference sequence corresponding to SEQ ID NO: 36, 238, 320, 360, 442, or 578.

[0306] In some embodiments, the recombinant polynucleotide comprises a polynucleotide sequence encoding an engineered RNase inhibitor comprising an amino acid sequence comprising at least a substitution or substitution set at the amino acid position(s) of an RNase inhibitor variant provided in Tables 8.1, 9.1, 9.2, 10.1, 11.1, 12.1, 12.2, 13.1, 13.2, 14.1, and 14.2, wherein the amino acid positions are relative to the reference sequence corresponding to residues 13 to 468 of SEQ ID NO: 36, 238, 320, 360, 442, or 578, or relative to the reference sequence corresponding to SEQ ID NO: 36, 238, 320, 360, 442, or 578.

[0307] In some embodiments, the recombinant polynucleotide comprises a polynucleotide sequence encoding an engineered RNase inhibitor comprising an amino acid sequence comprising at least a substitution or substitution set of an RNase inhibitor variant provided in Tables 8.1, 9.1, 9.2, 10.1, 11.1, 12.1, 12.2, 13.1, 13.2, 14.1, and 14.2, wherein the amino acid positions are relative to the reference sequence corresponding to residues 13 to 468 of SEQ ID NO: 36, 238, 320, 360, 442, or 578, or relative to the reference sequence corresponding to SEQ ID NO: 36, 238, 320, 360, 442, or 578.

[0308] In some embodiments, the recombinant polynucleotide comprises a polynucleotide sequence encoding an engineered RNase inhibitor comprising an amino acid sequence comprising at least 70%, 75%, 80%, 81%, 82%, 83%, 84%, 85%, 86%, 87%, 88%, 89%, 90%, 91%, 92%, 93%, 94%, 95%, 96%, 97%, 98%, 99% or more sequence identity to a reference sequence comprising a substitution or substitution set provided in Tables 8.1, 9.1, 9.2, 10.1, 11.1, 12.1, 12.2, 13.1, 13.2, 14.1, and 14.2, wherein the amino acid positions are relative to the reference sequence corresponding to residues 13 to 468 of SEQ ID NO: 36, 238, 320, 360, 442, or 578, or relative to the reference sequence corresponding to SEQ ID NO: 36, 238, 320, 360, 442, or 578.

[0309] In some embodiments, the recombinant polynucleotide comprises a polynucleotide sequence encoding an engineered RNase inhibitor comprising an amino acid sequence having at least 70%, 75%, 80%, 81%, 82%, 83%, 84%, 85%, 86%, 87%, 88%, 89%, 90%, 91%, 92%, 93%, 94%, 95%, 96%, 97%, 98%, 99% or more sequence identity to the sequence comprising residues 13 to 468 of an engineered RNase inhibitor set forth in Tables 8.1, 9.1, 9.2, 10.1, 11.1, 12.1, 12.2, 13.1, 13.2, 14.1, and 14.2, or to the sequence of an engineered RNase inhibitor set forth in Tables 8.1, 9.1, 9.2, 10.1, 11.1, 12.1, 12.2, 13.1, 13.2, 14.1, and 14.2.

[0310] In some embodiments, the recombinant polynucleotide comprises a polynucleotide sequence encoding an engineered RNase inhibitor comprising an amino acid sequence comprising residues 13 to 468 of an even numbered SEQ ID NO. of SEQ ID NOs: 26-824, or an amino acid sequence comprising an even numbered SEQ ID NO. of SEQ ID NOs: 26-824, optionally wherein the amino acid sequence has 1, 2, 3, 4, 5, 6, 7, 8, 9, or up to 10 substitutions.

[0311] In some embodiments, the recombinant polynucleotide comprises a polynucleotide sequence encoding the engineered RNase inhibitor comprising an amino acid sequence comprising residues 13 to 468 of SEQ ID NO: 36, 238, 320, 360, 442, or 578, or an amino acid sequence comprising SEQ ID NO: 36, 238, 320, 360, 442, or 578, optionally wherein the amino acid sequence has 1, 2, 3, 4, 5, 6, 7, 8, 9, or up to 10 substitutions in the amino acid sequence.

[0312] In some embodiments, the recombinant polynucleotide comprises a polynucleotide sequence having at least 70%, 75%, 75%, 80%, 81%, 82%, 83%, 84%, 85%, 90%, 91%, 92%, 93%, 94%, 95%, 96%, 97%, 98%, 99%, or more sequence identity to a reference polynucleotide sequence corresponding to nucleotide residues 37 to 1404 of SEQ ID NO: 35, 237, 319, 359, 441, or 577, or to a reference polynucleotide sequence corresponding to SEQ ID NO: 35, 237, 319, 359, 441, or 577, wherein the recombinant polynucleotide encodes an RNase inhibitor.

[0313] In some embodiments, the recombinant polynucleotide comprises a polynucleotide sequence having at least 70%, 75%, 80%, 81%, 82%, 83%, 84%, 85%, 90%, 91%, 92%, 93%, 94%, 95%, 96%, 97%, 98%, 99%, or more sequence identity to a reference polynucleotide sequence corresponding to nucleotide residues 37 to 1404 of an odd numbered SEQ ID NO. of SEQ ID NOs: 25-823, or to a reference polynucleotide sequence corresponding to an odd numbered SEQ ID NO. of SEQ ID NOs: 25-823, wherein the recombinant polynucleotide encodes an RNase inhibitor.

[0314] In some embodiments, the recombinant polynucleotide comprises a polynucleotide sequence having at least 70%, 75%, 80%, 85%, 86%, 87%, 88%, 89%, 90%, 91%, 92%, 93%, 94%, 95%, 96%, 97%, 98%, 99% or more sequence identity to a reference polynucleotide sequence corresponding to nucleotide residues 37 to 1404 of SEQ ID NO: 25, 27, 29, 31, 33, 35, 37, 39, 41, 43, 45, 47, 49, 51, 53, 55, 57, 59, 61, 63, 65, 67, 69, 71, 73, 75, 77, 79, 81, 83, 85, 87, 89, 91, 93, 95, 97, 99, 101, 103, 105, 107, 109, 111, 113, 115, 117, 119, 121, 123, 125, 127, 129, 131, 133, 135, 137, 139, 141, 143, 145, 147, 149, 151, 153, 155, 157, 159, 161, 163, 165, 167, 169, 171, 173, 175, 177, 179, 181, 183, 185, 187, 189, 191, 193, 195, 197, 199, 201, 203, 205, 207, 209, 211, 213, 215, 217, 219, 221, 223, 225, 227, 229, 231, 233, 235, 237, 239, 241, 243, 245, 247, 249, 251, 253, 255, 257, 259, 261, 263, 265, 267, 269, 271, 273, 275, 277, 279, 281, 283, 285, 287, 289, 291, 293, 295, 297, 299, 301, 303, 305, 307, 309, 311, 313, 315, 317, 319, 321, 323, 325, 327, 329, 331, 333, 335, 337, 339, 341, 343, 345, 347, 349, 351, 353, 355, 357, 359, 361, 363, 365, 367, 369, 371, 373, 375, 377, 379, 381, 383, 385, 387, 389, 391, 393, 395, 397, 399, 401, 403, 405, 407, 409, 411, 413, 415, 417, 419, 421, 423, 425, 427, 429, 431, 433, 435, 437, 439, 441, 443, 445, 447, 449, 451, 453, 455, 457, 459, 461, 463, 465, 467, 469, 471, 473, 475, 477, 479, 481, 483, 485, 487, 489, 491, 493, 495, 497, 499, 501, 503, 505, 507, 509, 511, 513, 515, 517, 519, 521, 523, 525, 527, 529, 531, 533, 535, 537, 539, 541, 543, 545, 547, 549, 551, 553, 555, 557, 559, 561, 563, 565, 567, 569, 571, 573, 575, 577, 579, 581, 583, 585, 587, 589, 591, 593, 595, 597, 599, 601, 603, 605, 607, 609, 611, 613, 615, 617, 619, 621, 623, 625, 627, 629, 631, 633, 635, 637, 639, 641, 643, 645, 647, 649, 651, 653, 655, 657, 659, 661, 663, 665, 667, 669, 671, 673, 675, 677, 679, 681, 683, 685, 687, 689, 691, 693, 695, 697, 699, 701, 703, 705, 707, 709, 711, 713, 715, 717, 719, 721, 723, 725, 727, 729, 731, 733, 735, 737, 739, 741, 743, 745, 747, 749, 751, 753, 755, 757, 759, 761, 763, 765, 767, 769, 771, 773, 775, 777, 779, 781, 783, 785, 787, 789, 791, 793, 795, 797, 799, 801, 803, 805, 807, 809, 811, 813, 815, 817, 819, 821, or 823, wherein the recombinant polynucleotide encodes an RNase inhibitor.

[0315] In some embodiments, the recombinant polynucleotide comprises a polynucleotide sequence having at least 70%, 75%, 80%, 85%, 86%, 87%, 88%, 89%, 90%, 91%, 92%, 93%, 94%, 95%, 96%, 97%, 98%, 99% or more sequence identity to the reference polynucleotide sequence corresponding to SEQ ID NO: 25, 27, 29, 31, 33, 35, 37, 39, 41, 43, 45, 47, 49, 51, 53, 55, 57, 59, 61, 63, 65, 67, 69, 71, 73, 75, 77, 79, 81, 83, 85, 87, 89, 91, 93, 95, 97, 99, 101, 103, 105, 107, 109, 111, 113, 115, 117, 119, 121, 123, 125, 127, 129, 131, 133, 135, 137, 139, 141, 143, 145, 147, 149, 151, 153, 155, 157, 159, 161, 163, 165, 167, 169, 171, 173, 175, 177, 179, 181, 183, 185, 187, 189, 191, 193, 195, 197, 199, 201, 203, 205, 207, 209, 211, 213, 215, 217, 219, 221, 223, 225, 227, 229, 231, 233, 235, 237, 239, 241, 243, 245, 247, 249, 251, 253, 255, 257, 259, 261, 263, 265, 267, 269, 271, 273, 275, 277, 279, 281, 283, 285, 287, 289, 291, 293, 295, 297, 299, 301, 303, 305, 307, 309, 311, 313, 315, 317, 319, 321, 323, 325, 327, 329, 331, 333, 335, 337, 339, 341, 343, 345, 347, 349, 351, 353, 355, 357, 359, 361, 363, 365, 367, 369, 371, 373, 375, 377, 379, 381, 383, 385, 387, 389, 391, 393, 395, 397, 399, 401, 403, 405, 407, 409, 411, 413, 415, 417, 419, 421, 423, 425, 427, 429, 431, 433, 435, 437, 439, 441, 443, 445, 447, 449, 451, 453, 455, 457, 459, 461, 463, 465, 467, 469, 471, 473, 475, 477, 479, 481, 483, 485, 487, 489, 491, 493, 495, 497, 499, 501, 503, 505, 507, 509, 511, 513, 515, 517, 519, 521, 523, 525, 527, 529, 531, 533, 535, 537, 539, 541, 543, 545, 547, 549, 551, 553, 555, 557, 559, 561, 563, 565, 567, 569, 571, 573, 575, 577, 579, 581, 583, 585, 587, 589, 591, 593, 595, 597, 599, 601, 603, 605, 607, 609, 611, 613, 615, 617, 619, 621, 623, 625, 627, 629, 631, 633, 635, 637, 639, 641, 643, 645, 647, 649, 651, 653, 655, 657, 659, 661, 663, 665, 667, 669, 671, 673, 675, 677, 679, 681, 683, 685, 687, 689, 691, 693, 695, 697, 699, 701, 703, 705, 707, 709, 711, 713, 715, 717, 719, 721, 723, 725, 727, 729, 731, 733, 735, 737, 739, 741, 743, 745, 747, 749, 751, 753, 755, 757, 759, 761, 763, 765, 767, 769, 771, 773, 775, 777, 779, 781, 783, 785, 787, 789, 791, 793, 795, 797, 799, 801, 803, 805, 807, 809, 811, 813, 815, 817, 819, 821, or 823, wherein the recombinant polynucleotide encodes an RNase inhibitor.

[0316] In some embodiments, the recombinant polynucleotide comprises a polynucleotide sequence comprising nucleotide residues 37 to 1404 of SEQ ID NO: 25, 27, 29, 31, 33, 35, 37, 39, 41, 43, 45, 47, 49, 51, 53, 55, 57, 59, 61, 63, 65, 67, 69, 71, 73, 75, 77, 79, 81, 83, 85, 87, 89, 91, 93, 95, 97, 99, 101, 103, 105, 107, 109, 111, 113, 115, 117, 119, 121, 123, 125, 127, 129, 131, 133, 135, 137, 139, 141, 143, 145, 147, 149, 151, 153, 155, 157, 159, 161, 163, 165, 167, 169, 171, 173, 175, 177, 179, 181, 183, 185, 187, 189, 191, 193, 195, 197, 199, 201, 203, 205, 207, 209, 211, 213, 215, 217, 219, 221, 223, 225, 227, 229, 231, 233, 235, 237, 239, 241, 243, 245, 247, 249, 251, 253, 255, 257, 259, 261, 263, 265, 267, 269, 271, 273, 275, 277, 279, 281, 283, 285, 287, 289, 291, 293, 295, 297, 299, 301, 303, 305, 307, 309, 311, 313, 315, 317, 319, 321, 323, 325, 327, 329, 331, 333, 335, 337, 339, 341, 343, 345, 347, 349, 351, 353, 355, 357, 359, 361, 363, 365, 367, 369, 371, 373, 375, 377, 379, 381, 383, 385, 387, 389, 391, 393, 395, 397, 399, 401, 403, 405, 407, 409, 411, 413, 415, 417, 419, 421, 423, 425, 427, 429, 431, 433, 435, 437, 439, 441, 443, 445, 447, 449, 451, 453, 455, 457, 459, 461, 463, 465, 467, 469, 471, 473, 475, 477, 479, 481, 483, 485, 487, 489, 491, 493, 495, 497, 499, 501, 503, 505, 507, 509, 511, 513, 515, 517, 519, 521, 523, 525, 527, 529, 531, 533, 535, 537, 539, 541, 543, 545, 547, 549, 551, 553, 555, 557, 559, 561, 563, 565, 567, 569, 571, 573, 575, 577, 579, 581, 583, 585, 587, 589, 591, 593, 595, 597, 599, 601, 603, 605, 607, 609, 611, 613, 615, 617, 619, 621, 623, 625, 627, 629, 631, 633, 635, 637, 639, 641, 643, 645, 647, 649, 651, 653, 655, 657, 659, 661, 663, 665, 667, 669, 671, 673, 675, 677, 679, 681, 683, 685, 687, 689, 691, 693, 695, 697, 699, 701, 703, 705, 707, 709, 711, 713, 715, 717, 719, 721, 723, 725, 727, 729, 731, 733, 735, 737, 739, 741, 743, 745, 747, 749, 751, 753, 755, 757, 759, 761, 763, 765, 767, 769, 771, 773, 775, 777, 779, 781, 783, 785, 787, 789, 791, 793, 795, 797, 799, 801, 803, 805, 807, 809, 811, 813, 815, 817, 819, 821, or 823.

[0317] In some embodiments, the recombinant polynucleotide comprises a polynucleotide sequence comprising SEQ ID NO: 25, 27, 29, 31, 33, 35, 37, 39, 41, 43, 45, 47, 49, 51, 53, 55, 57, 59, 61, 63, 65, 67, 69, 71, 73, 75, 77, 79, 81, 83, 85, 87, 89, 91, 93, 95, 97, 99, 101, 103, 105, 107, 109, 111, 113, 115, 117, 119, 121, 123, 125, 127, 129, 131, 133, 135, 137, 139, 141, 143, 145, 147, 149, 151, 153, 155, 157, 159, 161, 163, 165, 167, 169, 171, 173, 175, 177, 179, 181, 183, 185, 187, 189, 191, 193, 195, 197, 199, 201, 203, 205, 207, 209, 211, 213, 215, 217, 219, 221, 223, 225, 227, 229, 231, 233, 235, 237, 239, 241, 243, 245, 247, 249, 251, 253, 255, 257, 259, 261, 263, 265, 267, 269, 271, 273, 275, 277, 279, 281, 283, 285, 287, 289, 291, 293, 295, 297, 299, 301, 303, 305, 307, 309, 311, 313, 315, 317, 319, 321, 323, 325, 327, 329, 331, 333, 335, 337, 339, 341, 343, 345, 347, 349, 351, 353, 355, 357, 359, 361, 363, 365, 367, 369, 371, 373, 375, 377, 379, 381, 383, 385, 387, 389, 391, 393, 395, 397, 399, 401, 403, 405, 407, 409, 411, 413, 415, 417, 419, 421, 423, 425, 427, 429, 431, 433, 435, 437, 439, 441, 443, 445, 447, 449, 451, 453, 455, 457, 459, 461, 463, 465, 467, 469, 471, 473, 475, 477, 479, 481, 483, 485, 487, 489, 491, 493, 495, 497, 499, 501, 503, 505, 507, 509, 511, 513, 515, 517, 519, 521, 523, 525, 527, 529, 531, 533, 535, 537, 539, 541, 543, 545, 547, 549, 551, 553, 555, 557, 559, 561, 563, 565, 567, 569, 571, 573, 575, 577, 579, 581, 583, 585, 587, 589, 591, 593, 595, 597, 599, 601, 603, 605, 607, 609, 611, 613, 615, 617, 619, 621, 623, 625, 627, 629, 631, 633, 635, 637, 639, 641, 643, 645, 647, 649, 651, 653, 655, 657, 659, 661, 663, 665, 667, 669, 671, 673, 675, 677, 679, 681, 683, 685, 687, 689, 691, 693, 695, 697, 699, 701, 703, 705, 707, 709, 711, 713, 715, 717, 719, 721, 723, 725, 727, 729, 731, 733, 735, 737, 739, 741, 743, 745, 747, 749, 751, 753, 755, 757, 759, 761, 763, 765, 767, 769, 771, 773, 775, 777, 779, 781, 783, 785, 787, 789, 791, 793, 795, 797, 799, 801, 803, 805, 807, 809, 811, 813, 815, 817, 819, 821, or 823.

[0318] In some embodiments, the recombinant polynucleotide comprises a polynucleotide sequence comprising nucleotide residues 37 to 1404 of SEQ ID NO. 35, 237, 319, 359, 441, or 577, or a polynucleotide sequence comprising SEQ ID NOs: 35, 237, 319, 359, 441, or 577.

[0319] In some embodiments, the present disclosure provides a recombinant polynucleotide capable of hybridizing under highly stringent conditions to a reference polynucleotide encoding an engineered RNase inhibitor polypeptide described herein, e.g., a recombinant polynucleotide provided in Tables 8.1, 9.1, 9.2, 10.1, 11.1, 12.1, 12.2, 13.1, 13.2, 14.1, and 14.2, or a reverse complement thereof. In some embodiments, the recombinant polynucleotide hybridizes under highly stringent conditions to a reference polynucleotide corresponding to nucleotide residues 37 to 1404 of SEQ ID NO. 35, 237, 319, 359, 441, or 577, or a polynucleotide sequence comprising SEQ ID NOs: 35, 237, 319, 359, 441, or 577, or a reverse complement thereof. In some embodiments, the recombinant polynucleotide hybridizes under highly stringent conditions to a polynucleotide corresponding to nucleotide residues 37 to 1404 of an odd numbered SEQ ID NO. of SEQ ID NOs: 25-823, or a polynucleotide corresponding to an odd numbered SEQ ID NO. of SEQ ID NOs: 25-823, or a reverse complement thereof.

[0320] In some embodiments, the present disclosure provides a recombinant polynucleotide capable of hybridizing under highly stringent conditions to a reverse complement of a reference polynucleotide encoding an engineered RNase inhibitor polypeptide described herein, wherein the recombinant polynucleotide hybridizing under stringent conditions encodes an RNase inhibitor polypeptide comprising an amino acid sequence having one or more amino acid differences as compared to SEQ ID NO: 2, 36, 238, 320, 360, 442, or 578, at residue positions selected from any positions as set forth in Tables 8.1, 9.1, 9.2, 10.1, 11.1, 12.1, 12.2, 13.1, 13.2, 14.1, and 14.2. In some embodiments, the recombinant polynucleotide that hybridizes under highly stringent conditions to a reverse complement of a reference polynucleotide encoding an engineered RNase inhibitor polypeptide described herein encodes an RNase inhibitor polypeptide having one or more amino acid differences present in an engineered RNase inhibitor having an amino acid sequence corresponding to residues 13 to 468 of an even numbered SEQ ID NO. of SEQ ID NOs: 24-582, or an amino acid sequence comprising an even numbered SEQ ID NO. of SEQ ID NOs: 24-582, wherein the amino acid differences are relative to SEQ ID NO: 14, 42, or 204.

[0321] In some embodiments, the recombinant polynucleotide that hybridizes under highly stringent conditions comprises a polynucleotide sequence having at least 70%, 75%, 80%, 81%, 82%, 83%, 84%, 85%, 86%, 87%, 88%, 89%, 90%, 91%, 92%, 93%, 94%, 95%, 96%, 97%, 98%, 99% or more sequence identity to a reference polynucleotide sequence corresponding to nucleotide residues 37 to 1404 of SEQ ID NO: 35, 237, 319, 359, 441, or 577, or to a reference polynucleotide sequence corresponding to SEQ ID NO: 35, 237, 319, 359, 441, or 577, or a reverse complement thereof. In some embodiments, the recombinant polynucleotide that hybridizes under highly stringent conditions comprises a polynucleotide sequence having at least 70%, 75%, 80%, 81%, 82%, 83%, 84%, 85%, 86%, 87%, 88%, 89%, 90%, 91%, 92%, 93%, 94%, 95%, 96%, 97%, 98%, 99% or more sequence identity to a reference polynucleotide sequence corresponding to nucleotide residues 37 to 1404 of an odd-numbered SEQ ID NO. of SEQ ID NOs: 25-823, or an odd-numbered SEQ ID NO. of SEQ ID NOs: 25-823, or a reverse complement thereof.

[0322] In some additional embodiments, the polynucleotide hybridizing under highly stringent conditions comprises a polynucleotide sequence having at least 75%, 80%, 81%, 82%, 83%, 84%, 85%, 86%, 87%, 88%, 89%, 90%, 91%, 92%, 93%, 94%, 95%, 96%, 97%, 98%, 99% or more sequence identity to a reverse complement of a polynucleotide reference sequence corresponding to nucleotide residues 37 to 1404 of SEQ ID NO: 35, 237, 319, 359, 441, or 577, or to a reference polynucleotide sequence corresponding to SEQ ID NO: 35, 237, 319, 359, 441, or 577 encodes an engineered RNase inhibitor polypeptide. In some embodiments, the polynucleotide hybridizing under highly stringent conditions comprises a polynucleotide sequence having at least 75%, 80%, 81%, 82%, 83%, 84%, 85%, 86%, 87%, 88%, 89%, 90%, 91%, 92%, 93%, 94%, 95%, 96%, 97%, 98%, 99% or more sequence identity to a reverse complement of a polynucleotide reference sequence corresponding to nucleotide residues 37 to 1404 of an odd-numbered SEQ ID NO. of SEQ ID NOs: 25-823, or an odd-numbered SEQ ID NO. of SEQ ID NOs: 25-823 encodes an engineered RNase inhibitor polypeptide.

[0323] In some embodiments, the recombinant polynucleotide comprises a polynucleotide sequence encoding an engineered RNase inhibitor comprising an amino acid sequence having at least 70%, 75%, 80%, 81%, 82%, 83%, 84%, 85%, 86%, 87%, 88%, 89%, 90%, 91%, 92%, 93%, 94%, 95%, 96%, 97%, 98%, 99%, or more sequence identity to a reference sequence corresponding to
[0324] (a) residues 12 to 467 of SEQ ID NO: 4; residues 12 to 467 of SEQ ID NO: 6; residues 12 to 472 of SEQ ID NO: 8; residues 12 to 467 of SEQ ID NO: 10; residues 12 to 472 of SEQ ID NO: 12; residues 12 to 467 of SEQ ID NO: 14; residues 12 to 467 of SEQ ID NO: 16; residues 12 to 471 of SEQ ID NO: 18; residues 12 to 467 of SEQ ID NO: 20; residues 12 to 467 of SEQ ID NO: 22; or residues 12 to 467 of SEQ ID NO: 24; or
[0325] (b) SEQ ID NO: 2, 4, 6, 8, 10, 12, 14, 16, 18, 20, 22, or 24.

[0326] In some embodiments, the recombinant polynucleotide comprises a polynucleotide sequence encoding an engineered RNase inhibitor comprising an amino acid sequence comprising
[0327] (a) residues 12 to 467 of SEQ ID NO: 4; residues 12 to 467 of SEQ ID NO: 6; residues 12 to 472 of SEQ ID NO: 8; residues 12 to 467 of SEQ ID NO: 10; residues 12 to 472 of SEQ ID NO: 12; residues 12 to 467 of SEQ ID NO: 14; residues 12 to 467 of SEQ ID NO: 16; residues 12 to 471 of SEQ ID NO: 18; residues 12 to 467 of SEQ ID NO: 20; residues 12 to 467 of SEQ ID NO: 22; or residues 12 to 467 of SEQ ID NO: 24; or
[0328] (b) SEQ ID NO: 2, 4, 6, 8, 10, 12, 14, 16, 18, 20, 22, or 24.

[0329] In some embodiments, the recombinant polynucleotide comprises a polynucleotide sequence comprising at least 70%, 75%, 80%, 81%, 82%, 83%, 84%, 85%, 86%, 87%, 88%, 89%, 90%, 91%, 92%, 93%, 94%, 95%, 96%, 97%, 98%, 99%, or more sequence identity to the reference sequence corresponding to
[0330] (a) nucleotide residues 34 to 1401 of SEQ ID NO: 3; nucleotide residues 34 to 1401 of SEQ ID NO: 5; nucleotide residues 34 to 1416 of SEQ ID NO: 7; nucleotide residues 34 to 1401 of SEQ ID NO: 9; nucleotide residues 34 to 1416 of SEQ ID NO: 11; nucleotide residues 34 to 1401 of SEQ ID NO: 13; nucleotide residues 34 to 1401 of SEQ ID NO: 15; nucleotide residues 34 to 1413 of SEQ ID NO: 17; nucleotide residues 34 to 1401 of SEQ ID NO: 19; nucleotide residues 34 to 1401 of SEQ ID NO: 21; or nucleotide residues 34 to 1401 of SEQ ID NO: 23; or
[0331] (b) SEQ ID NO: 1, 3, 5, 7, 9, 11, 13, 15, 17, 19, 21, or 23, wherein the recombinant polynucleotide encodes an RNase inhibitor.

[0332] In some embodiments, the recombinant polynucleotide comprises a polynucleotide sequence comprising
[0333] (a) nucleotide residues 34 to 1401 of SEQ ID NO: 3; nucleotide residues 34 to 1401 of SEQ ID NO: 5; nucleotide residues 34 to 1416 of SEQ ID NO: 7; nucleotide residues 34 to 1401 of SEQ ID NO: 9; nucleotide residues 34 to 1416 of SEQ ID NO: 11; nucleotide residues 34 to 1401 of SEQ ID NO: 13; nucleotide residues 34 to 1401 of SEQ ID NO: 15; nucleotide residues 34 to 1413 of SEQ ID NO: 17; nucleotide residues 34 to 1401 of SEQ ID NO: 19; nucleotide residues 34 to 1401 of SEQ ID NO: 21; or nucleotide residues 34 to 1401 of SEQ ID NO: 23; or
[0334] (b) SEQ ID NO: 1, 3, 5, 7, 9, 11, 13, 15, 17, 19, 21, or 23.

[0335] In some embodiments, a recombinant polynucleotide encoding any of the RNase inhibitors herein is manipulated in a variety of ways to facilitate expression of the RNase inhibitor polypeptide. In some embodiments, the recombinant polynucleotide encoding the RNase inhibitor comprises expression vectors where one or more control sequences, particularly heterologous control sequences, is present to regulate the expression of the RNase inhibitor polynucleotides and/or polypeptides. Manipulation of the isolated polynucleotide prior to its insertion into a vector may be desirable or necessary depending on the expression vector utilized. Techniques for modifying polynucleotides and nucleic acid sequences utilizing recombinant DNA methods are well known in the art. In some embodiments, the control sequences include among others, promoters, leader sequences, polyadenylation sequences, propeptide sequences, signal peptide sequences, and transcription terminators.

[0336] In some embodiments, suitable promoters are selected based on the host cells selection. For bacterial host cells, suitable promoters for directing transcription of the nucleic acid constructs of the present disclosure, include, but are not limited to promoters obtained from the E. coli lac operon, Streptomyces coelicolor agarase gene (dagA), Bacillus subtilis levansucrase gene (sacB), Bacillus licheniformis alpha-amylase gene (amyL), Bacillus stearothermophilus maltogenic amylase gene (amyM), Bacillus amyloliquefaciens alpha-amylase gene (amyQ), Bacillus licheniformis penicillinase gene (penP), Bacillus subtilis xylA and xylB genes, and prokaryotic beta-lactamase gene (see, e.g., Villa-Kamaroff et al., Proc. Natl Acad. Sci. USA, 1978, 75:3727-3731), as well as the tac promoter (see, e.g., DeBoer et al., Proc. Natl Acad. Sci. USA, 1983, 80:21-25). Exemplary promoters for filamentous fungal host cells, include, but are not limited to promoters obtained from the genes for Aspergillus oryzae TAKA amylase, Rhizomucor miehei aspartic proteinase, Aspergillus niger neutral alpha-amylase, Aspergillus niger acid stable alpha-amylase, Aspergillus niger or Aspergillus awamori glucoamylase (glaA), Rhizomucor miehei lipase, Aspergillus oryzae alkaline protease, Aspergillus oryzae triose phosphate isomerase, Aspergillus nidulans acetamidase, and Fusarium oxysporum trypsin-like protease (see, e.g., WO 96/00787), as well as the NA2-tpi promoter (a hybrid of the promoters from the genes for Aspergillus niger neutral alpha-amylase and Aspergillus oryzae triose phosphate isomerase), and mutant, truncated, and hybrid promoters thereof. Exemplary yeast cell promoters can be from the genes for Saccharomyces cerevisiae enolase (ENO-1), Saccharomyces cerevisiae galactokinase (GAL1), Saccharomyces cerevisiae alcohol dehydrogenase/glyceraldehyde-3-phosphate dehydrogenase (ADH2/GAP), and Saccharomyces cerevisiae 3-phosphoglycerate kinase. Other useful promoters for yeast host cells are known in the art (see, e.g., Romanos et al., Yeast, 1992, 8:423-488). Exemplary promoters for use in insect cells include, but are not limited to, polyhedrin, p10, ELT, OpIE2, and hr5/iel promoters. Exemplary promoters for use in mammalian cells include, but are not limited to, those from cytomegalovirus (CMV), chicken β-actin promoter fused with the CMV enhancer, Simian vacuolating virus 40 (SV40), from Homo sapiens phosphoglycerate kinase, beta actin, elongation factor-la or glyceraldehyde-3-phosphate dehydrogenase, and from Gallus β-actin.

[0337] In some embodiments, the control sequence is a suitable transcription terminator sequence (i.e., a sequence recognized by a host cell to terminate transcription). In some embodiments, the terminator sequence is operably linked to the 3′ terminus of the nucleic acid sequence encoding the RNase inhibitor polypeptide. Any suitable terminator which is functional in the host cell of choice finds use in the present invention. For bacterial expression, the transcription terminators can be a Rho-dependent terminators that rely on a Rho transcription factor, or a Rho-independent, or intrinsic terminators, which do not require a transcription factor. Exemplary bacterial transcription terminators are described in Peters et al., J Mol Biol., 2011, 412 (5): 793-813. Exemplary transcription terminators for filamentous fungal host cells can be obtained from the genes for Aspergillus oryzae TAKA amylase, Aspergillus niger glucoamylase, Aspergillus nidulans anthranilate synthase, Aspergillus niger alpha-glucosidase, and Fusarium oxysporum trypsin-like protease. Exemplary terminators for yeast host cells can be obtained from the genes for Saccharomyces cerevisiae enolase, Saccharomyces cerevisiae cytochrome C (CYC1), and Saccharomyces cerevisiae glyceraldehyde-3-phosphate dehydrogenase. Other useful terminators for yeast host cells are known in the art (see, e.g., Romanos et al., supra). Exemplary terminators for mammalian cells include, but are not limited to those from cytomegalovirus (CMV), Simian virus 40 (SV40), from Homo sapiens growth hormone hGH, from bovine growth hormone BGH, and from human or rabbit beta globulin.

[0338] In some embodiments, the control sequence is a suitable leader sequence, a non-translated region of an mRNA that is important for translation by the host cell. In some embodiments, the leader sequence is operably linked to the 5′ terminus of the nucleic acid sequence encoding the RNase inhibitor polypeptide. Any suitable leader sequence that is functional in the host cell of choice find use in the present invention. Exemplary leaders for filamentous fungal host cells are obtained from the genes for Aspergillus oryzae TAKA amylase, and Aspergillus nidulans triose phosphate isomerase. Suitable leaders for yeast host cells are obtained from the genes for Saccharomyces cerevisiae enolase (ENO-1), Saccharomyces cerevisiae 3-phosphoglycerate kinase, Saccharomyces cerevisiae alpha-factor, and Saccharomyces cerevisiae alcohol dehydrogenase/glyceraldehyde-3-phosphate dehydrogenase (ADH2/GAP). Suitable leaders for mammalian host cells include but are not limited to the 5′-UTR element present in orthopoxvirus mRNA.

[0339] In some embodiments, the control sequence is a polyadenylation sequence (i.e., a sequence operably linked to the 3′ terminus of the nucleic acid sequence and which, when transcribed, is recognized by the host cell as a signal to add polyadenosine residues to transcribed mRNA). Any suitable polyadenylation sequence which is functional in the host cell of choice finds use in the present invention. Exemplary polyadenylation sequences for filamentous fungal host cells include, but are not limited to the genes for Aspergillus oryzae TAKA amylase, Aspergillus niger glucoamylase, Aspergillus nidulans anthranilate synthase, Fusarium oxysporum trypsin-like protease, and Aspergillus niger alpha-glucosidase. Useful polyadenylation sequences for yeast host cells are known (see, e.g., Guo and Sherman, Mol. Cell. Biol., 1995, 15:5983-5990). Useful polyadenylation and 3′ UTR sequences for mammalian host cells include, but are not limited to, the 3′-UTRs of α- and β-globin mRNAs that harbor several sequence elements that increase the stability and translation of mRNA.

[0340] In some embodiments, the control sequence is also a signal peptide (i.e., a coding region that codes for an amino acid sequence linked to the amino terminus of a polypeptide and directs the encoded polypeptide into the cell's secretory pathway). In some embodiments, the 5′ end of the coding sequence of the nucleic acid sequence inherently contains a signal peptide coding region naturally linked in translation reading frame with the segment of the coding region that encodes the secreted polypeptide. Alternatively, in some embodiments, the 5′ end of the coding sequence contains a signal peptide coding region that is foreign to the coding sequence. Any suitable signal peptide coding region which directs the expressed polypeptide into the secretory pathway of a host cell of choice finds use for expression of the engineered polypeptide(s). Effective signal peptide coding regions for bacterial host cells are the signal peptide coding regions include, but are not limited to those obtained from the genes for Bacillus NCIB 11837 maltogenic amylase, Bacillus stearothermophilus alpha-amylase, Bacillus licheniformis subtilisin, Bacillus licheniformis beta-lactamase, Bacillus stearothermophilus neutral proteases (nprT, nprS, nprM), and Bacillus subtilis prsA. Further signal peptides are known in the art (see, e.g., Simonen and Palva, Microbiol. Rev., 1993, 57:109-137). In some embodiments, effective signal peptide coding regions for filamentous fungal host cells include, but are not limited to the signal peptide coding regions obtained from the genes for Aspergillus oryzae TAKA amylase, Aspergillus niger neutral amylase, Aspergillus niger glucoamylase, Rhizomucor miehei aspartic proteinase, Humicola insolens cellulase, and Humicola lanuginosa lipase. Useful signal peptides for yeast host cells include, but are not limited to those from the genes for Saccharomyces cerevisiae alpha-factor and Saccharomyces cerevisiae invertase. Useful signal peptides for insect and mammalian host cells include but are not limited to, those from the genes for immunoglobulin gamma (IgG) and the signal peptide in a human secreted protein, such as human beta-galactosidase polypeptide.

[0341] In some embodiments, the control sequence is a propeptide coding region that codes for an amino acid sequence positioned at the amino terminus of a polypeptide. The resultant polypeptide is referred to as a “proenzyme,” “propolypeptide,” or “zymogen.” A propolypeptide can be converted to a mature active polypeptide by catalytic or autocatalytic cleavage of the propeptide from the propolypeptide. The propeptide coding region may be obtained from any suitable source, including, but not limited to the genes for Bacillus subtilis alkaline protease (aprE), Bacillus subtilis neutral protease (nprT), Saccharomyces cerevisiae alpha-factor, Rhizomucor miehei aspartic proteinase, and Myceliophthora thermophila lactase (see, e.g., WO 95/33836). Where both signal peptide and propeptide regions are present at the amino terminus of a polypeptide, the propeptide region is positioned next to the amino terminus of a polypeptide and the signal peptide region is positioned next to the amino terminus of the propeptide region.

[0342] In some embodiments, regulatory sequences are also utilized. These sequences facilitate the regulation of the expression of the polypeptide relative to the growth of the host cell. Examples of regulatory systems are those that cause the expression of the gene to be turned on or off in response to a chemical or physical stimulus, including the presence of a regulatory compound. In prokaryotic host cells, suitable regulatory sequences include, but are not limited to the lac, tac, and trp operator systems. In yeast host cells, suitable regulatory systems include, but are not limited to the ADH2 system or GAL1 system. In filamentous fungi, suitable regulatory sequences include, but are not limited to the TAKA alpha-amylase promoter, Aspergillus niger glucoamylase promoter, and Aspergillus oryzae glucoamylase promoter.

[0343] In another aspect, the present disclosure provides an expression vector comprising a recombinant polynucleotide encoding an engineered RNase inhibitor polypeptide, and one or more expression regulating regions such as a promoter and a terminator, a replication origin, etc., depending on the type of hosts into which they are to be introduced. In some embodiments, the various nucleic acid and control sequences described herein are joined together (i.e., operably linked) to produce recombinant expression vectors which include one or more convenient restriction sites to allow for insertion or substitution of the nucleic acid sequence encoding the RNase inhibitor polypeptide at such sites. Alternatively, in some embodiments, the nucleic acid sequence of the present disclosure is expressed by inserting the nucleic acid sequence or a nucleic acid construct comprising the sequence into an appropriate vector for expression. In some embodiments involving the creation of the expression vector, the coding sequence is located in the vector so that the coding sequence is operably linked with the appropriate control sequences for expression.

[0344] The recombinant expression vector may be any suitable vector (e.g., a plasmid or virus), that can be conveniently subjected to recombinant DNA procedures and bring about the expression of the encoded RNase inhibitor polypeptide. The choice of the vector typically depends on the compatibility of the vector with the host cell into which the vector is to be introduced. The vectors may be linear or closed circular plasmids.

[0345] In some embodiments, the expression vector is an autonomously replicating vector (i.e., a vector that exists as an extra-chromosomal entity, the replication of which is independent of chromosomal replication, such as a plasmid, an extra-chromosomal element, a minichromosome, or an artificial chromosome). The vector may contain any means for assuring self-replication. In some alternative embodiments, the vector is one in which, when introduced into the host cell, it is integrated into the genome and replicated together with the chromosome(s) into which it has been integrated. Furthermore, in some embodiments, a single vector or plasmid, or two or more vectors or plasmids which together contain the total DNA to be introduced into the genome of the host cell, and/or a transposon is utilized.

[0346] In some embodiments, the expression vector contains one or more selectable markers, which permit selection of transformed cells. A “selectable marker” is a gene, the product of which provides for biocide or viral resistance, resistance to heavy metals, prototrophy to auxotrophs, and the like. Examples of bacterial selectable markers include, but are not limited to the dal genes from Bacillus subtilis or Bacillus licheniformis, or markers, which confer antibiotic resistance such as ampicillin, kanamycin, chloramphenicol or tetracycline resistance. Suitable markers for yeast host cells include, but are not limited to ADE2, HIS3, LEU2, LYS2, MET3, TRP1, and URA3. Selectable markers for use in filamentous fungal host cells include, but are not limited to, amdS (acetamidase; e.g., from A. nidulans or A. orzyae), argB (ornithine carbamoyltransferases), bar (phosphinothricin acetyltransferase; e.g., from S. hygroscopicus), hph (hygromycin phosphotransferase), niaD (nitrate reductase), pyrG (orotidine-5′-phosphate decarboxylase; e.g., from A. nidulans or A. orzyae), sC (sulfate adenyltransferase), and trpC (anthranilate synthase), as well as equivalents thereof.

[0347] In another aspect, the present disclosure provides a host cell comprising a recombinant polynucleotide encoding at least one engineered RNase inhibitor polypeptide described herein, the polynucleotide(s) being operably linked to one or more control sequences for expression of the engineered RNase inhibitor polypeptide(s) in the host cell. In some embodiments, the host cell comprises an expression vector comprising a recombinant polynucleotide encoding an engineered RNase inhibitor polypeptide described herein, where the polynucleotide is operably linked to one or more control sequences. Host cells suitable for use in expressing the polypeptides encoded by the expression vectors of the present disclosure are known in the art and include but are not limited to, bacterial cells, such as E. coli, B. subtilis, Vibrio fluvialis, Streptomyces and Salmonella typhimurium cells; fungal cells, such as yeast cells (e.g., Saccharomyces cerevisiae or Pichia pastoris (ATCC Accession No. 201178)); insect cells such as Drosophila S2 and Spodoptera Sf9 cells; animal cells such as CHO, COS, BHK, 293, and Bowes melanoma cells; and plant cells. Exemplary host cells also include various Escherichia coli strains (e.g., W3110 (AfhuA) and BL21).

[0348] In another aspect, the present disclosure provides a method of producing the engineered RNase inhibitor polypeptides, where the method comprises culturing a host cell capable of expressing a polynucleotide encoding the engineered RNase inhibitor polypeptide under conditions suitable for expression of the polypeptide such that the engineered RNase inhibitor is produced. In some embodiments, the method further comprises the step(s) of isolating the RNase inhibitor polypeptides from the culture and/or host cells. In some embodiments, the method further comprises purifying the expressed RNase inhibitor polypeptide, as described herein.

[0349] Appropriate culture media and growth conditions for host cells are known in the art. It is contemplated that any suitable method for introducing polynucleotides for expression of the RNase inhibitor polypeptides into cells will find use in the present invention. Suitable techniques include, but are not limited to electroporation, biolistic particle bombardment, liposome mediated transfection, calcium chloride transfection, and protoplast fusion.

[0350] In some embodiments, recombinant polypeptides (e.g., RNase inhibitor polypeptide variants) can be produced using any suitable methods known the art. For example, there is a wide variety of different mutagenesis techniques well known to those skilled in the art. In addition, mutagenesis kits are also available from many commercial molecular biology suppliers. Methods are available to make specific substitutions at defined amino acids (site-directed), specific or random mutations in a localized region of the gene (region-specific), or random mutagenesis over the entire gene (e.g., saturation mutagenesis). Numerous suitable methods are known to those in the art to generate polypeptide variants, including but not limited to site-directed mutagenesis of single-stranded DNA or double-stranded DNA using PCR, cassette mutagenesis, gene synthesis, error-prone PCR, shuffling, and chemical saturation mutagenesis, or any other suitable method known in the art. Non-limiting examples of methods used for DNA and protein engineering are provided in the following patents: U.S. Pat. Nos. 6,117,679; 6,420,175; 6,376,246; 6,586,182; 7,747,391; 7,747,393; 7,783,428; and 8,383,346. After the variants are produced, they can be screened for any desired property (e.g., high or increased inhibitory activity, or low or reduced activity, increased thermal activity, increased stability, increased substrate range, increased inhibitor resistance or tolerance, increased salt tolerance, and/or pH stability, etc.).

[0351] In some embodiments, the engineered RNase inhibitor polypeptides with the properties disclosed herein can be obtained by subjecting the polynucleotide encoding the naturally-occurring or engineered RNase inhibitor polypeptide to a suitable mutagenesis and/or directed evolution methods known in the art, for example, as described herein. An exemplary directed evolution technique is mutagenesis and/or DNA shuffling (see, e.g., Stemmer, Proc. Natl. Acad. Sci. USA, 1994, 91:10747-10751; WO 95/22625; WO 97/0078; WO 97/35966; WO 98/27230; WO 00/42651; WO 01/75767 and U.S. Pat. No. 6,537,746). Other directed evolution procedures that can be used include, among others, staggered extension process (StEP), in vitro recombination (see, e.g., Zhao et al., Nat. Biotechnol., 1998, 16:258-261), mutagenic PCR (see, e.g., Caldwell et al., PCR Methods Appl., 1994, 3: S136-S140), and cassette mutagenesis (see, e.g., Black et al., Proc. Natl. Acad. Sci. USA, 1996, 93:3525-3529).

[0352] Mutagenesis and directed evolution methods can be applied to RNase inhibitor-encoding polynucleotides to generate variant libraries that can be expressed, screened, and assayed. Any suitable mutagenesis and directed evolution methods find use in the present disclosure and are known in the art (see, e.g., U.S. Pat. Nos. 5,605,793, 5,811,238, 5,830,721, 5,834,252, 5,837,458, 5,928,905, 6,096,548, 6,117,679, 6,132,970, 6,165,793, 6,180,406, 6,251,674, 6,265,201, 6,277,638, 6,287,861, 6,287,862, 6,291,242, 6,297,053, 6,303,344, 6,309,883, 6,319,713, 6,319,714, 6,323,030, 6,326,204, 6,335,160, 6,335,198, 6,344,356, 6,352,859, 6,355,484, 6,358,740, 6,358,742, 6,365,377, 6,365,408, 6,368,861, 6,372,497, 6,337,186, 6,376,246, 6,379,964, 6,387,702, 6,391,552, 6,391,640, 6,395,547, 6,406,855, 6,406,910, 6,413,745, 6,413,774, 6,420,175, 6,423,542, 6,426,224, 6,436,675, 6,444,468, 6,455,253, 6,479,652, 6,482,647, 6,483,011, 6,484,105, 6,489,146, 6,500,617, 6,500,639, 6,506,602, 6,506,603, 6,518,065, 6,519,065, 6,521,453, 6,528,311, 6,537,746, 6,573,098, 6,576,467, 6,579,678, 6,586,182, 6,602,986, 6,605,430, 6,613,514, 6,653,072, 6,686,515, 6,703,240, 6,716,631, 6,825,001, 6,902,922, 6,917,882, 6,946,296, 6,961,664, 6,995,017, 7,024,312, 7,058,515, 7,105,297, 7,148,054, 7,220,566, 7,288,375, 7,384,387, 7,421,347, 7,430,477, 7,462,469, 7,534,564, 7,620,500, 7,620,502, 7,629,170, 7,702,464, 7,747,391, 7,747,393, 7,751,986, 7,776,598, 7,783,428, 7,795,030, 7,853,410, 7,868,138, 7,783,428, 7,873,477, 7,873,499, 7,904,249, 7,957,912, 7,981,614, 8,014,961, 8,029,988, 8,048,674, 8,058,001, 8,076,138, 8,108,150, 8,170,806, 8,224,580, 8,377,681, 8,383,346, 8,457,903, 8,504,498, 8,589,085, 8,762,066, 8,768,871, 9,593,326, 9,665,694, 9,684,771, and all related PCT and non-US counterparts; Ling et al., Anal. Biochem., 1997, 254 (2): 157-78; Dale et al., Meth. Mol. Biol., 1996, 57:369-74; Smith, Ann. Rev. Genet., 1985, 19:423-462; Botstein et al., Science, 1985, 229:1193-1201; Carter, Biochem. J., 1986, 237:1-7; Kramer et al., Cell, 1984, 38:879-887; Wells et al., Gene, 1985, 34:315-323; Minshull et al., Curr. Op. Chem. Biol., 1999, 3:284-290; Christians et al., Nat. Biotechnol., 1999, 17:259-264; Crameri et al., Nature, 1998, 391:288-291; Crameri, et al., Nat. Biotechnol., 1997, 15:436-438; Zhang et al., Proc. Nat. Acad. Sci. U.S.A., 1997, 94:4504-4509; Crameri et al., Nat. Biotechnol., 1996, 14:315-319; Stemmer, Nature, 1994, 366:389-391; Stemmer, Proc. Nat. Acad. Sci. USA, 1994, 91:10747-10751; EP 3 049 973; WO 95/22625; WO 97/0078; WO 97/35966; WO 98/27230; WO 00/42651; WO 01/75767; WO 2009/152336; and WO 2015/048573, all of which are incorporated herein by reference).

[0353] In some embodiments, the clones obtained following mutagenesis treatment are screened by subjecting the polypeptide preparations to a defined treatment conditions or assay conditions (e.g., buffer, temperature, pH condition, RNA substrate, etc.) and measuring polypeptide activity after the treatments or other suitable assay conditions. Clones containing a polynucleotide encoding the polypeptide of interest are then isolated from the gene, sequenced to identify the nucleotide sequence changes (if any), and used to express the polypeptide in a host cell. Measuring polypeptide activity from the expression libraries can be performed using any suitable method known in the art and as described in the Examples.

[0354] For engineered polypeptides of known sequence, the polynucleotides encoding the polypeptide can be prepared by standard solid-phase methods, according to known synthetic methods. In some embodiments, fragments of up to about 100 bases can be individually synthesized, then joined (e.g., by enzymatic or chemical ligation methods, or polymerase mediated methods) to form any desired continuous sequence (see, e.g., Hughes et al., Cold Spring Harb Perspect Biol. 2017 January; 9 (1): a023812). For example, polynucleotides and oligonucleotides disclosed herein can be prepared by chemical synthesis using the classical phosphoramidite method (see, e.g., Beaucage et al., Tet. Lett., 1981, 22:1859-69; and Matthes et al., EMBO J., 1984, 3:801-05), as it is typically practiced in automated synthetic methods. According to the phosphoramidite method, oligonucleotides are synthesized (e.g., in an automatic DNA synthesizer), purified, annealed, ligated and cloned in appropriate vectors.

[0355] In some embodiments, a method for preparing the engineered RNase inhibitor polypeptide can comprise: (a) synthesizing a polynucleotide encoding a polypeptide comprising an amino acid sequence of any RNase inhibitor as described herein, and (b) expressing the RNase inhibitor polypeptide encoded by the polynucleotide. In some embodiments of the method, the amino acid sequence encoded by the polynucleotide can optionally have one or several (e.g., up to 3, 4, 5, or up to 10) amino acid residue deletions, insertions and/or substitutions. In some embodiments, the amino acid sequence has optionally 1-2, 1-3, 1-4, 1-5, 1-6, 1-7, 1-8, 1-9, 1-10, 1-15, 1-20, 1-21, 1-22, 1-23, 1-24, 1-25, 1-30, 1-35, 1-40, 1-45, or 1-50 amino acid residue deletions, insertions and/or substitutions. In some embodiments, the amino acid sequence has optionally 1, 2, 3, 4, 5, 6, 7, 8, 9, 10, 11, 12, 13, 14, 15, 16, 17, 18, 19, 20, 21, 22, 23, 24, 25, 30, 30, 35, 40, 45, or 50 amino acid residue deletions, insertions and/or substitutions. In some embodiments, the amino acid sequence has optionally 1, 2, 3, 4, 5, 6, 7, 8, 9, 10, 11, 12, 13, 14, 15, 16, 18, 20, 21, 22, 23, 24, or 25 amino acid residue deletions, insertions and/or substitutions. In some embodiments, the substitutions are conservative or non-conservative substitutions.

[0356] In some embodiments, any of the engineered RNase inhibitor polypeptides expressed in a host cell are recovered and/or purified from the cells and/or the culture medium using any one or more of the known techniques for protein purification, including, among others, lysozyme treatment, sonication, filtration, salting-out, ultra-centrifugation, and chromatography.

[0357] Chromatographic techniques for isolation and purification of the RNase inhibitor polypeptides include, among others, reverse phase chromatography, high-performance liquid chromatography, ion-exchange chromatography, hydrophobic-interaction chromatography, size-exclusion chromatography, gel electrophoresis, and affinity chromatography. Conditions for purifying a particular polypeptide may depend, in part, on factors such as net charge, hydrophobicity, hydrophilicity, molecular weight, molecular shape, etc., and will be apparent to those having skill in the art. In some embodiments, affinity techniques may be used to isolate the improved RNase inhibitor polypeptides. For affinity chromatography purification, any antibody that specifically binds an RNase inhibitor polypeptide of interest can be used. For the production of antibodies, various host animals, including but not limited to rabbits, mice, rats, etc., are immunized by injection with an RNase inhibitor polypeptide, or a fragment thereof. In some embodiments, the RNase inhibitor polypeptide or fragment is attached to a suitable carrier, such as BSA, by means of a side chain functional group or linkers attached to a side chain functional group. Where the engineered RNase inhibitor includes a fusion polypeptide that allows for affinity purification, such as a His-tag, standard affinity methods for the particular fusion protein can be used.

### Composition of RNase Inhibitors

[0358] In a further aspect, the present disclosure provides compositions of the RNase inhibitors disclosed herein. In some embodiments, the composition comprises at least one engineered RNase inhibitor polypeptide described herein. In some embodiments, the engineered RNase inhibitor polypeptide in the composition is isolated or purified. In some embodiments, the RNase inhibitor is combined with other components and compounds to provide compositions and formulations comprising the engineered RNase inhibitor polypeptide as appropriate for different applications and uses.

[0359] In some embodiments, the composition comprises at least one engineered RNase inhibitor described herein. For example, a composition comprises at least one engineered RNase inhibitor provided in Tables 8.1, 9.1, 9.2, 10.1, 11.1, 12.1, 12.2, 13.1, 13.2, 14.1, and 14.2.

[0360] In some embodiments, the composition comprises an RNase inhibitor provided in Table 3.3. In some embodiments, the composition comprises an RNase inhibitor with an amino acid sequence comprising: (a) residues 13 to 468 of SEQ ID NO: 2; residues 12 to 467 of SEQ ID NO: 4; residues 12 to 467 of SEQ ID NO: 6; residues 12 to 472 of SEQ ID NO: 8; residues 12 to 467 of SEQ ID NO: 10; residues 12 to 472 of SEQ ID NO: 12; residues 12 to 467 of SEQ ID NO: 14; residues 12 to 467 of SEQ ID NO: 16; residues 12 to 471 of SEQ ID NO: 18; residues 12 to 467 of SEQ ID NO: 20; residues 12 to 467 of SEQ ID NO: 22; or residues 12 to 467 of SEQ ID NO: 24; or
[0361] (b) SEQ ID NO: 2, 4, 6, 8, 10, 12, 14, 16, 18, 20, 22, or 24.

[0362] In some embodiments, the composition further comprises one or more of a buffer and an RNA substrate. In some embodiments, the buffer includes a reducing agent, such as dithiothreitol. In some embodiments, the composition further comprises a cryoprotecting agent, including, among others, glycerol, polyethylene glycol, Ficoll, or dextran. In some embodiments, dextran can also act as an inhibitor of RNase in the composition. In some embodiments, the composition further comprises a molecular crowding agent, including, among others, bovine serum albumin (BSA), polyethylene glycol, dextran, and/or Ficoll. In some embodiments, the composition comprising an engineered RNase inhibitor is a lyophilizate.

[0363] In some embodiments, the composition comprises an engineered RNase inhibitor disclosed herein, and a nucleic acid modifying enzyme. In some embodiments, the nucleic acid modifying enzyme comprises a polymerase. In some embodiments, the polymerase comprises an RNA polymerase. In some embodiments, the polymerase comprises a reverse transcriptase. In some embodiments, the polymerase comprises a DNA dependent DNA polymerase, in particular a thermal DNA polymerase. In some embodiments, the polymerase comprises a terminal transferase or poly-A polymerase, or other template-independent polymerases. In some embodiments, the nucleic acid modifying enzyme comprises an RNA ligase. In some embodiments, the nucleic acid modifying enzyme comprises a polynucleotide kinase or phosphatase.

[0364] In some embodiments, an engineered RNase inhibitor described herein is provided in solution, as a lyophilizate, or immobilized on a substrate. In some embodiments, the RNase inhibitor is provided on a substrate, such as a solid substrate, porous substrate, membrane, or particles. The polypeptide can be entrapped in matrixes or membranes. In some embodiments, matrices include polymeric materials such as calcium-alginate, agar, k-carrageenin, polyacrylamide, and collagen, or solid matrices, such as activated carbon, porous ceramic, and diatomaceous earth. In some embodiments, the matrix is a particle, a membrane, or a fiber. Types of membranes include, among others, nylon, cellulose, polysulfone, or polyacrylate.

[0365] In some embodiments, the RNase inhibitor is immobilized on the surface of a support material. In some embodiments, the polypeptide is adsorbed on the support material. In some embodiments, the polypeptide is immobilized on the support material by covalent attachment. Support materials include, among others, inorganic materials, such as alumina, silica, porous glass, ceramics, diatomaceous earth, clay, and bentonite, or organic materials, such as cellulose (CMC, DEAE-cellulose), starch, activated carbon, polyacrylamide, polystyrene, and ion-exchange resins, such as Amberlite, Sephadex, and Dowex.

### Uses of Engineered RNase Inhibitor Polypeptides and Kits

[0366] In another aspect, the present disclosure provides uses of the engineered RNase inhibitors in applications involving RNA and/or where RNase may be present. In some embodiments, the engineered RNase inhibitor is used to inhibit RNase activity, the method comprising contacting an RNase with an engineered RNase inhibitor described herein under conditions suitable for inhibiting RNase activity.

[0367] In some embodiments, the suitable conditions comprises a temperature of about 4° C. to about 75° C. In some embodiments, the suitable conditions comprises a temperature of about 25° C. to about 75° C. In some embodiments, the suitable conditions comprises a temperature of about 50° C. to about 75° C. In some embodiments, the suitable conditions comprises a temperature of about 4° C. to about 50° C. In some embodiments, the suitable conditions comprises a temperature of about 4° C. to about 25° C.

[0368] In some embodiments, the engineered RNase inhibitor is used when isolating RNA. In some embodiments, the engineered RNase inhibitor is added to a sample containing or suspected of containing RNA. In some embodiments, the sample is a biological sample, such as cells, tissues, including biopsy and autopsy samples, frozen sections taken for histological purposes, blood, plasma, serum, sputum, stool, tears, mucus, hair, skin, etc. In some embodiments, the biological sample are cells or viruses, such as from a bacterial culture, virus culture, or cell culture. In some embodiments, the sample is an environmental sample, including, among others, water, including samples from ocean, river, refuse/sewer, etc., soil, air, vents, or surfaces, such as floors, machinery, counters, etc.

[0369] In some embodiments, the engineered RNase inhibitor is used in combination with a reverse transcriptase in preparing a cDNA copy of an RNA template, such as for preparation of cDNA libraries or diagnostics for a target RNA, such as bacterial, fungal or viral RNA.

[0370] In some embodiments, the engineered RNase inhibitor is used for in vitro transcription reactions, for example with an RNA polymerase. By way of example and not limitation, the in vitro transcription can use a T7 RNA polymerase or engineered T7 RNA polymerases or other bacterial or viral RNA polymerases, and a DNA template of interest. In some embodiments, the in vitro transcription can be a coupled in vitro transcription and translation system for in vitro synthesis of proteins.

[0371] In some embodiments, the engineered RNase inhibitor is used in RT-PCR, RT-qPCR, and RT-LAMP reactions. In particular, the increased thermostability of the engineered RNase inhibitor makes it suitable in RT-PCR applications.

[0372] In some embodiments, the engineered RNase inhibitor is used in RNA microarray or RNA sequencing applications, such as for transcriptome-wide analysis of differential gene expression and differential splicing of mRNAs (see, e.g., Stark et al., Nature Reviews Genetics, 2019, 20:631-656).

[0373] In some embodiments, the engineered RNase inhibitor is used in combination with an RNA ligase in ligating RNA, such as reactions using RNA ligase 1 and/or RNA ligase 2 to ligate RNA fragments. In some embodiments, the engineered RNase inhibitor is used in reactions for ligation of modified RNA fragments, where the modifications include, among others, 2′-O-alkyl, 2′-halo, and/or phosphorothioate internucleotide linkages.

[0374] In some embodiments, the engineered RNase inhibitor is used to enhance CRISPR mediated engineering of genomes in cells (see, e.g., Laoharawee et al., Int J Mol Sci., 2022, 23 (17): 9749). Introduction on the RNase inhibitor into the cell subject to CRISPR mediated engineering can enhance CRISPR mediated genome editing.

[0375] In a further aspect, the present disclosure provides a kit comprising an RNase inhibitor or a composition thereof described herein. In some embodiments, the kit further comprises at least a buffer. In some embodiments, the buffer includes a reducing agent, e.g., dithiothreitol. In some embodiments, the composition further comprises a cryoprotecting agent, such as glycerol, polyethylene glycol (e.g., PEG 6000 and PEG 8000), or dextran. In some embodiments, the composition further comprises a molecular crowding agent, including, among others, bovine serum albumin (BSA), polyethylene glycol, dextran, and/or Ficoll. In some embodiments, the composition comprises an RNA substrate. In some embodiments, the RNase inhibitor is provided as a lyophilizate.

[0376] In some embodiments, the kit further comprises a nucleic acid modifying enzyme other than the RNase inhibitor. In some embodiments, the nucleic acid modifying enzyme comprises a polymerase. In some embodiments, the polymerase comprises an RNA polymerase. In some embodiments, the polymerase comprises a reverse transcriptase. In some embodiments, the polymerase comprises a DNA dependent DNA polymerase, in particular a thermal DNA polymerase. In some embodiments, the polymerase comprises a terminal transferase or poly-A polymerase, or other template-independent polymerase acting on an RNA substrate. In some embodiments, the nucleic acid modifying enzyme comprises an RNA ligase, a polynucleotide kinase, or a phosphatase.

### EXAMPLES

[0377] The following Examples, including experiments and results achieved, are provided for illustrative purposes only and are not to be construed as limiting the present invention.

[0378] In the experimental disclosure below, the following abbreviations where relevant apply: ppm (parts per million); M (molar); mM (millimolar), uM and μM (micromolar); nM (nanomolar); mol (moles); gm and g (gram); mg (milligrams); ug and μg (micrograms); L and 1 (liter); ml and mL (milliliter); ul, uL, μl, and μL (microliter); cm (centimeters); mm (millimeters); um and μm (micrometers); sec. (seconds); min(s) (minute(s)); h(s) and hr(s) (hour(s)); U (units); OD (optical density); MW (molecular weight); rpm (rotations per minute); rcf (relative centrifugal force); psi and PSI (pounds per square inch); ° C. (degrees Celsius); RT and rt (room temperature); ds (double stranded); ss (single stranded); CDS (coding sequence); DNA (deoxyribonucleic acid); RNA (ribonucleic acid); E. coli W3110 (commonly used laboratory E. coli strain, available from the Coli Genetic Stock Center [CGSC], New Haven, CT); HTP (high throughput); HPLC (high pressure liquid chromatography); FPLC (fast protein liquid chromatography); ddH2O (double distilled water); PBS (phosphate buffered saline); BSA (bovine serum albumin); DTT (dithiothreitol); CAM (chloramphenicol); CAT (chloramphenicol acetyltransferase); IPTG (isopropyl β-D-1-thiogalactopyranoside); FIOPC or FIOP (fold improvements over positive control or parent); LB (Luria-Bertani); TB (Terrific-Broth).

### Example 1

E. coli Expression Hosts Containing Recombinant Ribonuclease Inhibitor (RNH1) Genes

[0379] The initial ribonuclease inhibitor (RNase inhibitor or RI) used to produce the variants of the present disclosure was SEQ ID NO: 2 cloned into the expression vector pCK110900 (See, FIG. 3 of US Pat. Appln. Publn. No. 2006/0195947) operatively linked to the lac promoter under control of the lacl repressor. The expression vector also contains the P15a origin of replication and the chloramphenicol resistance gene. E. coli W3110 were transformed with the resulting plasmids, using standard methods known in the art. The transformants were isolated by subjecting the cells to chloramphenicol selection, as known in the art (See e.g., U.S. Pat. No. 8,383,346 and WO2010/144103).

### Example 2

### Preparation of Shake-Flask Purified RNase Inhibitor

### Shake-Flask Expression

[0380] Selected cultures grown as described above were plated onto Luria Broth (LB) agar plates with 1% glucose and 30 μg/ml chloramphenicol and grown overnight at 37° C. A single colony from each culture was transferred to 5 ml of LB broth with 1% glucose and 30 μg/ml chloramphenicol. The cultures were grown for 20 h at 30° C., 250 rpm, and sub-cultured at a dilution of approximately 1:50 into 250 ml of Terrific Broth with 30 μg/ml of chloramphenicol, to a final OD₆₀₀ of about 0.05. The cultures were incubated for approximately 195 min at 30° C., 250 rpm, to an OD₆₀₀ of about 0.6, and then induced with the addition of IPTG at a final concentration of 1 mM. The induced cultures were incubated for 20 h at 30° C., 250 rpm. Following this incubation period, the cultures were centrifuged at 4000 rpm×10 min. The culture supernatant liquid was discarded, and the pellets were resuspended in 30 mL of 50 mM Tris-HCl, pH 8.0. This cell suspension was chilled in an ice bath and lysed using a Microfluidizer cell disruptor (Microfluidics M-110L). The crude lysate was pelleted by centrifugation (10,000 rpm for 60 min at 4° C.), and the supernatant liquid was then filtered through a 0.2 μm PES membrane to further clarify the lysate.

Purification of RNase Inhibitor from Shake-Flask Lysates

[0381] RNase inhibitor lysates were purified using an AKTA Pure purification system and a 5-mL HisTrap FF column (GE Healthcare); the run parameters are provided in Table 2.1. The shake-flask wash buffer comprised 50 mM Tris-HCl pH 8.0, 500 mM NaCl, 20 mM imidazole, 0.02% v/v Triton X-100 reagent, the elution buffer comprised 50 mM Tris-HCl pH 8.0, 500 mM NaCl, 250 mM imidazole, 0.02% v/v Triton X-100 reagent, and the storage buffer comprised 40 mM Tris-HCl pH 8.0, 100 mM KCl, 0.1 mM EDTA, and 50% (v/v) glycerol.

TABLE 2.1
Purification Parameters

| Parameter | Volume | |
|---|---|---|
| Column volume | 5 | ml |
| Pressure limit | 0.3 | MPa |
| Sample volume | 40 | mL |
| Wash Unbound volume | 20 CV = 100 mL | |
| Elution | Isocratic (step) | |
| Elution volume | 5 CV = 25 mL | |
| Fraction volume | 1.5 | mL |

| | |
|---|---|
| Re-equilibration volume | 5 CV = 25 mL |

[0382] The three or four most concentrated 1.5 mL fractions based on UV absorption (A280) were pooled and a fraction thereof was dialyzed overnight in storage buffer in a 3.5K Slide-A-Lyzer™ dialysis cassette (ThermoFisher) for buffer exchange. RNase inhibitor concentrations in the preparations were measured by absorption at 280 nm, normalized to 2 mg mL-1 with storage buffer and stored at −20° C. until further use.

### Example 3

### Gene Acquisition-Activity of RNase Inhibitor Homologs

[0383] Genes encoding RNase inhibitors, as provided in Table 3.1, were used to prepare RNA inhibitor polypeptides for initial screening. The sequence identity between each of the RNase inhibitors is shown in Table 3.2. A solution of RNase A was prepared by diluting RNase A (ThermoFisher, cat #EN0531) to a concentration of 10 μg mL-1 in isothermal buffer (New England Biolabs, cat #B0537S, 20 mM Tris-HCl, 10 mM (NH₄)₂SO₄, 50 mM KCl, 2 mM MgSO₄, 0.1% Tween® 20, pH 8.8). Diluted RNase A solution (10 μL) was added to each well of a skirted 384-well PCR plate. Purified RNase inhibitor (as prepared in Example 2, 10 μL) was added to each well of the skirted 384-well PCR plate containing RNase A. The plate was briefly vortexed and centrifuged to mix, then incubated at 37° C. for 15 minutes. RNaseAlert substrate was prepared by resuspending in 1 mL TE buffer and mixing 1:1 with 10× RNaseAlert buffer. Following incubation, the RNaseAlert assay was initiated by adding the mixture of purified RNase inhibitor and RNase A solution (8 μL per well) to a skirted 384-well PCR plate containing RNaseAlert substrate and buffer mixture (2 μL per well). The plate was briefly vortexed and centrifuged to mix, then inserted into a CFX Touch 384-well Real-Time PCR Detection System (Bio-Rad). The plate was incubated at 37° C. and increase of fluorescence from RNaseAlert substrate cleavage was monitored in the FAM channel. Wells with less RNase inhibition result in a higher RNaseAlert substrate cleavage and thus higher relative fluorescence units (RFU). RNase inhibitor activity was calculated as the ratio of RFU of the no inhibitor negative control to the last data point collected for a given sample and is shown in Table 3.3.

TABLE 3.1
RNH1 genes assayed, with source
organism and UniProt ID for each.

| SEQ ID NO: | Source organism | UniProtKB_ID |
|---|---|---|
| 1/2 | Ailuropoda melanoleuca | GILVD8 |
| 3/4 | Odobenus rosmarus divergens | A0A2U3ZJ48 |
| 5/6 | Heterocephalus glaber | G5C479 |
| 7/8 | Erinaceus europaeus | A0A1S3WTP7 |
| 9/10 | Mus musculus | Q91VI7 |
| 11/12 | Loxodonta africana | G3SPV7 |
| 13/14 | Pteropus alecto | L5KQY7 |
| 15/16 | Desmodus rotundus | K9IKE3 |
| 17/18 | Callithrix jacchus | F7HNE6 |
| 19/20 | Trichechus manatus latirostris | A0A2Y9E8W7 |
| 21/22 | Canis lupus familiaris | F1PK29 |
| 23/24 | Alligator sinensis | A0A1U7RRY1 |

TABLE 3.2

| | SEQ ID | SEQ ID | SEQ ID | SEQ ID | SEQ ID | SEQ ID | SEO ID | SEQ ID | SEQ ID | SEQ ID | SEO ID | SEQ ID |
|---|---|---|---|---|---|---|---|---|---|---|---|---|
| | NO: 2 | NO: 4 | NO: 6 | NO: 8 | NO: 10 | NO: 12 | NO: 14 | NO: 16 | NO: 18 | NO: 20 | NO: 22 | NO: 24 |
| SEQ ID | 100 | 88.9 | 68.3 | 63.5 | 74.9 | 70.3 | 74.3 | 68.5 | 67.6 | 67.4 | 79.6 | 51.5 |
| NO: 2 | | | | | | | | | | | | |
| SEQ ID | 88.9 | 100 | 68.7 | 64.6 | 73.8 | 69.8 | 72.7 | 67.8 | 66 | 68.4 | 81.2 | 51.4 |
| NO: 4 | | | | | | | | | | | | |
| SEQ ID | 68.9 | 68.7 | 100 | 61.2 | 70.6 | 68.1 | 67.8 | 65.9 | 63.6 | 65.9 | 65.5 | 48.8 |
| NO: 6 | | | | | | | | | | | | |
| SEQ ID | 65.5 | 64.6 | 61.2 | 100 | 67.1 | 64.5 | 64.3 | 62.7 | 60.6 | 65.2 | 61.4 | 48.5 |
| NO: 8 | | | | | | | | | | | | |
| SEQ ID | 74.9 | 73.8 | 70.6 | 67.1 | 100 | 69.4 | 70.6 | 66.3 | 68.1 | 68 | 69.9 | 51 |
| NO: 10 | | | | | | | | | | | | |
| SEQ ID | 70.3 | 69.8 | 68.1 | 64.5 | 69.4 | 100 | 68.6 | 64.6 | 643 | 85.2 | 63.9 | 50 |
| NO: 12 | | | | | | | | | | | | |
| SEQ ID | 74.3 | 72.7 | 67.8 | 64.3 | 70.6 | 68.6 | 100 | 72.5 | 65.6 | 68.2 | 69.1 | 48.4 |
| NO: 14 | | | | | | | | | | | | |
| SEQ ID | 68.5 | 67.8 | 633 | 62.7 | 66.3 | 64.6 | 72.5 | 108 | 63.5 | 64.8 | 64 | 48.8 |
| NO: 16 | | | | | | | | | | | | |
| SEQ ID | 67.6 | 66 | 65.6 | 60.6 | 68.1 | 64.3 | 65.6 | 63.5 | 100 | 64.3 | 63.7 | 48.9 |
| NO: 18 | | | | | | | | | | | | |
| SEQ ID | 67.4 | 68.4 | 65.9 | 65.2 | 68 | 85.2 | 68.2 | 64.8 | 64.3 | 100 | 61.6 | 49 |
| NO: 20 | | | | | | | | | | | | |
| SEQ ID | 79.6 | 81.2 | 63.5 | 61.4 | 69.9 | 63.9 | 69.1 | 64 | 63.7 | 61.8 | 100 | 48.6 |
| NO: 22 | | | | | | | | | | | | |
| SEQ ID | 51.5 | 51.4 | 48.8 | 48.3 | 51 | 50 | 48.4 | 48.8 | 48.9 | 49 | 48.6 | 100 |
| NO: 24 | | | | | | | | | | | | |

TABLE 3.3
RNase Inhibitor Activity of Variants
Relative to No Inhibitor Control

| SEQ ID NO: | Activity Ratio |
|---|---|
| (nt/aa) | (Relative to No Inhibitor Control) |
| 1/2 | +++ |
| 3/4 | +++ |
| 5/6 | ++ |
| 7/8 | ++ |
| 9/10 | ++ |
| 11/12 | ++ |
| 13/14 | + |
| 15/16 | + |
| 17/18 | + |
| 19/20 | + |
| 21/22 | + |
| 23/24 | + |

¹ Levels of increased activity were determined relative to the No Inhibitor Control and defined as follows: “+” 1.03 to 1.40-fold increased activity; “++” > 1.40-fold increased activity; “+++” > 1.70-fold increased activity.

### Example 4

### Preparation of HTP Ribonuclease Inhibitor (RNH1)-Containing Wet Cell Pellets

[0384] E. coli cells containing recombinant RNH1-encoding genes from monoclonal colonies were inoculated into 180 μL LB containing 1% glucose and 30 μg/mL chloramphenicol (CAM) in the wells of 96-well, shallow-well microtiter plates. The plates were sealed with O₂-permeable seals, and cultures were grown overnight at 30° C., 200 rpm, and 85% humidity. Then, 10 μL of each of the cell cultures were transferred into the wells of 96-well, deep-well plates containing 390 mL TB and 30 μg/mL CAM. The deep-well plates were sealed with O₂-permeable seals and incubated at 30° C., 250 rpm, and 85% humidity until OD₆₀₀ 0.6-0.8 was reached. The cell cultures were then induced by IPTG to a final concentration of 1 mM and incubated overnight under the same conditions as originally used. The cells were then pelleted using centrifugation at 4,000 rpm for 10 min. The supernatants were discarded, and the pellets were frozen at −80° C. prior to lysis.

### Example 5

### Preparation of HTP RNH1-Containing Lysozyme-Lysed Cell Lysates

[0385] First, 400 μL buffer containing 50 mM Triethanolamine-HCl pH 7.5 were added to the cell paste in each well, produced as described in Example 2. The cells were shaken on a bench-top shaker to resuspend. Resuspended cells (50 μL) were transferred to a 96-well hard-shell PCR plate containing lysozyme in buffer (50 μL of 0.1 g L⁻¹ lysozyme in 50 mM Triethanolamine-HCl pH 7.5) and pipetted to mix. The cell-lysozyme mixture was lysed for 60 minutes in a thermocycler at a set lysis temperature ranging from 48° C. to 56.5° C., specified in the specific example. The plate was then centrifuged for 15 min at 4,000 rpm and 4° C. The clarified supernatant liquids were optionally diluted and used in reactions to determine their ribonuclease inhibitor activity and thermostability.

### Example 6

### Preparation of HTP RNH1-Containing Heat-Treated Cell Lysates

[0386] First, 400 μL buffer containing 50 mM Triethanolamine-HCl pH 7.5 were added to the cell paste in each well, produced as described in Example 2. The cells were shaken on a bench-top shaker to resuspend. Resuspended cells (50 μL) were transferred to a 96-well hard-shell PCR plate containing buffer (50 μL of 50 mM Triethanolamine-HCl pH 7.5) and pipetted to mix. The cells were lysed for 60 minutes in a thermocycler at a set lysis temperature ranging from 56° C. to 71° C., specified in the specific example. The plate was then centrifuged for 15 min at 4,000 rpm and 4° C. The clarified supernatant liquids were optionally diluted and used in reactions to determine their ribonuclease inhibitor activity and thermostability.

### Example 7

### Use of Heat-Treated Lysate for Ribonuclease Inhibition Assays

[0387] A solution of RNase A was prepared by diluting RNase A (ThermoFisher, cat #EN0531) to a concentration of 1 μg mL-1 in isothermal buffer (New England Biolabs, cat #B0537S; 20 mM Tris-HCl, 10 mM (NH₄)₂SO₄, 50 mM KCl, 2 mM MgSO₄, 0.1% Tween® 20, pH 8.8). Diluted RNase A solution (8 μL) was added to each well of a skirted 384-well PCR plate. RNH1-containing heat-treated cell lysate (as prepared in either Example 5 or Example 6, 8 μL) was added to each well of the skirted 384-well PCR plate containing RNase A. The plate was briefly vortexed and centrifuged to mix, then incubated at 37° C. for 10 minutes. RNaseAlert substrate was prepared by resuspending in 1 mL TE buffer and mixing 1:1 with 10× RNaseAlert buffer. Following incubation, the RNaseAlert assay was initiated by adding the mixture of RNH1-containing heat-treated cell lysate and RNase A solution (4 μL per well) to a skirted 384-well PCR plate containing RNaseAlert substrate and buffer mixture (1 μL per well). The plate was briefly vortexed and centrifuged to mix, then inserted into a CFX Touch 384-well Real-Time PCR Detection System (Bio-Rad). The plate was incubated at 37° C. and increase of fluorescence from RNaseAlert substrate cleavage was monitored in the FAM channel.

### Example 8

Variants with Improvements Over SEQ ID NO: 2

[0388] SEQ ID NO: 2 was selected as the parent protein after screening wild-type proteins for both thermostability and ribonuclease inhibitor activity in lysozyme-lysed heat-treated lysates. Libraries of engineered genes were produced using established techniques (e.g., saturation mutagenesis, recombination of previously identified beneficial mutations). The polypeptides encoded by each gene were produced in HTP as described in Example 4, and the soluble lysozyme-lysed cell lysate was generated as described in Example 5, with a lysis temperature of 48° C. The clarified lysate was used to detect ribonuclease inhibitor activity as described in Example 7.

[0389] Each sample was evaluated by its residual RNase inhibition activity after heat treatment relative to SEQ ID NO: 2 (activity fold improvement over positive control, FIOP). In this example, activity FIOP is the ratio of SEQ ID NO:2's RFU to the given sample's RFU, both measured after the first qPCR incubation cycle. Activity FIOPs are shown in Table 8.1.

TABLE 8.1
RNase Inhibitor Activity of Variants Relative to SEQ ID NO: 2

| SEQ ID | | Activity FIOP after 48° C. |
|---|---|---|
| NO: | Amino Acid Differences | heat treatment |
| (nt/aa) | (Relative to SEQ ID NO: 2) | (Relative to SEQ ID NO: 2) |
| 25/26 | R257F/G459E | +++ |
| 27/28 | T345A | +++ |
| 29/30 | R257F | +++ |
| 31/32 | M296L | +++ |
| 33/34 | P113G | +++ |
| 35/36 | R95E/M296L/G459E | +++ |
| 37/38 | R257V | +++ |
| 39/40 | R95Q/R257F/M296I | ++ |
| 41/42 | S453M | ++ |
| 43/44 | T107I/V267K | ++ |
| 45/46 | M417L/I422V/G459E | ++ |
| 47/48 | A395L | ++ |
| 49/50 | A390S | ++ |
| 51/52 | R257G/M296I | ++ |
| 53/54 | D243C | ++ |
| 55/56 | V156M/R257S | ++ |
| 57/58 | V351R | ++ |
| 59/60 | T348K | ++ |
| 61/62 | C363E | ++ |
| 63/64 | S453R | ++ |
| 65/66 | R95E/R257F/M296I/I422V | ++ |
| 67/68 | A395C | ++ |
| 69/70 | I94L/T121S/F332L/A390T/V466I | ++ |
| 71/72 | R257G/M417L/E419D/G459E | ++ |
| 73/74 | N452R | ++ |
| 75/76 | R95E/R257F/M296I | ++ |
| 77/78 | A377S/A390T | ++ |
| 79/80 | S453F | + |
| 81/82 | N452K | + |
| 83/84 | D272N | + |
| 85/86 | D243S | + |
| 87/88 | Y126V/D386G | + |
| 89/90 | V267H | + |
| 91/92 | A390G | + |
| 93/94 | E430L | + |
| 95/96 | S453L | + |
| 97/98 | S453A | + |
| 99/100 | V230L/V429L | + |
| 101/102 | A377S/A390S | + |
| 103/104 | R257T | + |
| 105/106 | G459K | + |
| 107/108 | D272Q | + |
| 109/110 | E430G | + |
| 111/112 | S453K | + |
| 113/114 | V83L/T107I/V230L/V267T/V429L | + |
| 115/116 | V267R | + |
| 117/118 | T107I/V429L | + |
| 119/120 | D243R | + |
| 121/122 | D243M | + |
| 123/124 | T107A/Q323E/V429L | + |
| 125/126 | I94L/T121S/I265L/A390T | + |
| 127/128 | V400L | + |
| 129/130 | S453W | + |
| 131/132 | V351K | + |
| 133/134 | V429L | + |
| 135/136 | R257F/M296I | + |
| 137/138 | A395I | + |
| 139/140 | G459M | + |
| 141/142 | H81F | + |

¹ Levels of increased activity were determined relative to the reference polypeptide of SEQ ID NO: 2 and defined as follows: “+” 1.05 to 1.23-fold increased activity; “++” > 1.23-fold increased activity; “+++” > 1.28-fold increased activity.

### Example 9

Variants with Improvements Over SEQ ID NO: 36

[0390] SEQ ID NO: 36 was selected as the parent protein for this round of directed evolution. Libraries of engineered genes were produced using established techniques (e.g., saturation mutagenesis, recombination of previously identified beneficial mutations). The polypeptides encoded by each gene were produced in HTP as described in Example 4, and the soluble lysozyme-lysed cell lysate was generated as described in Example 5, with a lysis temperature of 52° C. or 56.5° C. The clarified lysate was used to detect ribonuclease inhibitor activity as described in Example 7.

[0391] Each sample was evaluated by its residual RNase inhibition activity after heat treatment relative to SEQ ID NO: 36 (activity fold improvement over positive control, FIOP). In this example, activity FIOP is the ratio of SEQ ID NO:36's RFU to the given sample's RFU, both measured after the first qPCR incubation cycle. Activity FIOPs are shown in Table 9.1.

TABLE 9.1
RNase Inhibitor Activity of Variants Relative to SEQ ID NO: 36

| | | Activity FIOP |
|---|---|---|
| | | after 52° C. |
| SEQ ID | Amino Acid Differences | heat treatment |
| NO: | (Relative to SEQ | (Relative to SEQ |
| (nt/aa) | ID NO: 36) | ID NO: 36) |
| 143/144 | Q323E/A390S/V429L | +++ |
| 145/146 | R257F/Q323E/V429L | +++ |
| 147/148 | R257F/A390S | +++ |
| 149/150 | R257F/Q323E/A390T | +++ |
| 151/152 | R257F/Q323E/A390S/V429L | +++ |
| 153/154 | R257F/V429L | +++ |
| 155/156 | R257F/A377T/A390T | +++ |
| 157/158 | A135V/R257F/Q323E/A377S/A390T | +++ |
| 159/160 | Q323E/A377T/A390S/V429L | +++ |
| 161/162 | R257F/Q323E/A390S | +++ |
| 163/164 | R257F/Q323E/A377S/A390S | ++ |
| 165/166 | R257F/Q323E/A377T/A390T | ++ |
| 167/168 | R257F/A377S/V429L | ++ |
| 169/170 | R257F/A390T | ++ |
| 171/172 | Y158C/R257F/Q323E/A377T/A390S | ++ |
| 173/174 | R257F/A377T/V429L | ++ |
| 175/176 | R257F/A377S/A390S | ++ |
| 177/178 | R257F/Q323E/A377S/A390T | ++ |
| 179/180 | R257F/Q323E/A377T/V429L | ++ |
| 181/182 | E167K/R257F/Q323E/A390S/V429L | ++ |
| 183/184 | Q323E/A390T/V429L | ++ |
| 185/186 | R257F/Q323E/A390T/V429L | ++ |
| 187/188 | A377T/A390S/V429L | ++ |
| 189/190 | R257F/A377T/A390S | + |
| 191/192 | A377T/A390S | + |
| 193/194 | R257F/Q323E/A377S/A390S/V429L | + |
| 195/196 | R257F/Q323E/A377S/A390T/V429L | + |
| 197/198 | R257F/Q323E/A377S/V429L | + |
| 199/200 | R257F/A377S | + |
| 201/202 | A390T/V429L | + |
| 203/204 | R257F/Q323E/A377T/A390S | + |
| 205/206 | R257F/Q323E/A377T/A390S/V429L | + |
| 207/208 | R257F/A377T/A390T/V429L | + |
| 209/210 | R257F/A390T/V429L | + |
| 211/212 | R257F/A377T/A390S/V429L | + |
| 213/214 | R257F/A377S/A390T | + |
| 215/216 | R257F/A377S/A390T/V429L | + |
| 217/218 | R257F/A390S/V429L | + |
| 219/220 | A377S/A390T | + |
| 221/222 | A390T | + |

¹ Levels of increased activity were determined relative to the reference polypeptide of SEQ ID NO: 36 and defined as follows: “+” 1.23 to 1.37-fold increased activity; “++” > 1.37-fold increased activity; “+++” > 1.42-fold increased activity.

TABLE 9.2
RNase Inhibitor Activity of Variants Relative to SEQ ID NO: 36

| SEQ ID | | Activity FIOP after 56.5° C. |
|---|---|---|
| NO: | Amino Acid Differences | heat treatment |
| (nt/aa) | (Relative to SEQ ID NO: 36) | (Relative to SEQ ID NO: 36) |
| 223/224 | D243S/C363E/A390G | +++ |
| 225/226 | P113G/R257F/V351K/C363E/V429L | +++ |
| 227/228 | P113G/R257V/V351K/A390S/E430G | +++ |
| 229/230 | P113G/R257V/D272N/A390S | +++ |
| 231/232 | P113G/D243M/V351K/A390S/V429L | +++ |
| 233/234 | R257V/D272N/T345A/T348K | +++ |
| 235/236 | D243S/R257T/V351R/A390S | +++ |
| 237/238 | P113G/D243M/R257T/D272N/A390G | +++ |
| 239/240 | R257T/D272Q/C363E/A390G/E430L | +++ |
| 241/242 | R257V/V351K/A390G | ++ |
| 243/244 | P113G/D243S/A390G/E430G | ++ |
| 245/246 | P113G/R257V/V267H/V351R/C363E/V400L/E430L | ++ |
| 247/248 | P113G/D243M/R257V/V351R/E430G | ++ |
| 249/250 | D243M/V267R/S341C/A390G/A395L | ++ |
| 251/252 | P113G/D243M/R257T/T345A/T348K | ++ |
| 253/254 | P113G/D243S/R257F/T348K/A390G | ++ |
| 255/256 | D243S/T345A/T348K/A390G | ++ |
| 257/258 | P113G/D243M/R257V/T345A/E430L | ++ |
| 259/260 | R257T/T345A/T348K/V351R/A390S/V429L/E430G | ++ |
| 261/262 | D272Q/T345A/A390G/V429L/E430L | ++ |
| 263/264 | D243M/V267R/V351K | ++ |
| 265/266 | D243R/D272N/T345A/A390G | ++ |
| 267/268 | P113G/R257T/C363E/A390G | ++ |
| 269/270 | D243S/A390G/V429L | ++ |
| 271/272 | P113G/D243M/R257F/V351K/A390G | ++ |
| 273/274 | P113G/D243M/D272Q/T345A/T348K/E430G | ++ |
| 275/276 | D243M/V267R/D272Q/T348K/A390G | ++ |
| 277/278 | P113G/R257T/D272Q/T345A/T348K/C363E/E430L | + |
| 279/280 | P113G/D243R/A390G/V429L/E430L | + |
| 281/282 | P113G/D243M/R257F/D272N/V351R/C363E | + |
| 283/284 | D243M/D272Q/T345A/T348K/C363E/A390S/A395L | + |
| 285/286 | P113G/D243M/D272Q/V351R/C363E/A390S/A395L | + |
| 287/288 | P113G/D243R/R257V/D272Q/T345A/A390S/E430L | + |
| 289/290 | P113G/D243S/V267R/D272Q/C363E/A390S/E430G | + |
| 291/292 | P113G/D243M/V267R/T348K/C363E/E430L | + |
| 293/294 | P113G/D243S/R257T/V351R/A390G/E430L | + |
| 295/296 | P113G/D243S/R257T/D272N/V351K/A390S | + |
| 297/298 | P113G/D243R/V267R/A390G/E430G | + |
| 299/300 | D243R/R257F/T348K/A395L/E430G | + |
| 301/302 | D243R/T345A/T348K/V429L/E430L | + |
| 303/304 | D243M/R257F/T345A/T348K/A395L | + |
| 305/306 | D243S/R257T/D272N/V351K/V400L/V429L | + |
| 307/308 | P113G/D243M/V267R | + |
| 309/310 | D243M/V267R/V351R | + |
| 311/312 | P113G/A390S/E430G | + |
| 313/314 | D243S/V267R/V351K/V400L | + |
| 315/316 | V429L/E430G | + |

¹ Levels of increased activity were determined relative to the reference polypeptide of SEQ ID NO: 36 and defined as follows: “+” 1.07 to 1.53-fold increased activity; “++” > 1.53-fold increased activity; “+++” > 1.64-fold increased activity.

### Example 10

Variants with Improvements Over SEQ ID NO: 238

[0392] SEQ ID NO: 238 as selected as the parent protein for this round of directed evolution. Libraries of engineered genes were produced using established techniques (e.g., saturation mutagenesis, recombination of previously identified beneficial mutations). The polypeptides encoded by each gene were produced in HTP as described in Example 4, and the soluble heat-treated cell lysate was generated as described in Example 6, with a lysis temperature of 57° C. The clarified lysate was used to detect ribonuclease inhibitor activity as described in Example 7.

[0393] Each sample was evaluated by its residual RNase inhibition activity after heat treatment relative to SEQ ID NO: 238 (activity fold improvement over positive control, FIOP). In this example, activity FIOP is the ratio of SEQ ID NO:238's RFU to the given sample's RFU, both measured after the first qPCR incubation cycle. Activity FIOPs are shown in Table 10.1.

TABLE 10.1
RNase Inhibitor Activity of Variants Relative to SEQ ID NO: 238

| | | Activity FIOP |
|---|---|---|
| | | after 57° C. |
| SEQ ID | Amino Acid Differences | heat treatment |
| NO: | (Relative to SEQ | (Relative to SEQ |
| (nt/aa) | ID NO: 238) | ID NO: 238) |
| 317/318 | Q323E/S453K | +++ |
| 319/320 | Q323E/T348K/N452R | +++ |
| 321/322 | N452R/S453A | +++ |
| 323/324 | Q323E/V351R/E430L/N452R/S453A | +++ |
| 325/326 | E291P | +++ |
| 327/328 | L145E | ++ |
| 329/330 | G228A | ++ |
| 331/332 | Q323E/V429L | ++ |
| 333/334 | L145G | ++ |
| 335/336 | L145M | ++ |
| 337/338 | E38T | + |
| 339/340 | H150Q | + |
| 341/342 | G228R | + |
| 343/344 | T12K | + |
| 345/346 | L173I | + |
| 347/348 | E38C/Q237R | + |
| 349/350 | V40I | + |
| 351/352 | E38R | + |

¹ Levels of increased activity were determined relative to the reference polypeptide of SEQ ID NO: 2 and defined as follows: “+” 1.04 to 1.50-fold increased activity; “++” > 1.50-fold increased activity; “+++” > 1.65-fold increased activity.

### Example 11

Variants with Improvements Over SEQ ID NO: 320

[0394] SEQ ID NO: 320 as selected as the parent protein for this round of directed evolution. Libraries of engineered genes were produced using established techniques (e.g., saturation mutagenesis, recombination of previously identified beneficial mutations). The polypeptides encoded by each gene were produced in HTP as described in Example 4, and the soluble heat-treated cell lysate was generated as described in Example 6, with a lysis temperature of 61° C. The clarified lysate was used to detect ribonuclease inhibitor activity as described in Example 7.

[0395] Each sample was evaluated by its residual RNase inhibition activity after heat treatment relative to SEQ ID NO: 320 (activity fold improvement over positive control, FIOP). In this example, activity FIOP is the ratio of SEQ ID NO:320's RFU to the given sample's RFU, both measured after the first qPCR incubation cycle. Activity FIOPs are shown in Table 11.1.

TABLE 11.1
RNase Inhibitor Activity of Variants Relative to SEQ ID NO: 320

| | | Activity FIOP |
|---|---|---|
| SEQ ID | | after 61° C. heat |
| NO: | Amino Acid Differences | treatment (Relative |
| (nt/aa) | (Relative to SEQ ID NO: 320) | to SEQ ID NO: 320) |
| 353/354 | M13T/L145M/G228A/E291P/K348T/V351R | +++ |
| 355/356 | S453R | +++ |
| 357/358 | T12K/M13T/S453R | +++ |
| 359/360 | L145V/G228R/E291P/S453R | +++ |
| 361/362 | M13T/L145V/S453R | +++ |
| 363/364 | L145M/G228R/E291P/S453R | ++ |
| 365/366 | L145V/E291P/S453R | ++ |
| 367/368 | E38T/L145V/S453R | ++ |
| 369/370 | T12K/L145M/S453R | ++ |
| 371/372 | S453K | ++ |
| 373/374 | E38T/L145I/G228A/S453R | ++ |
| 375/376 | L15R/T28H/H81T/E124A/A221S/R285Q/E317S | + |
| 377/378 | L15R/T28H/S64V/D203E/A221S/R285Q/E317S | + |
| 379/380 | L15R/S57M/H81T/E124A/Q148N/D203E | + |
| 381/382 | T12K/S453K | + |
| 383/384 | S56A/S57T/S64V/H81T/T91K/E124A/D203E/R285Q/E317S | + |
| 385/386 | T66I/P90G/S142H/K176S/A205P/A319G | + |
| 387/388 | G228R/S453K | + |
| 389/390 | L145I/G228A/S453A | + |

¹ Levels of increased activity were determined relative to the reference polypeptide of SEQ ID NO: 320 and defined as follows: “+” 1.19 to 1.50-fold increased activity; “++” >1.50-fold increased activity; “+++” >1.62-fold increased activity.

### Example 12

Variants with Improvements Over SEQ ID NO: 360

[0396] SEQ ID NO: 360 as selected as the parent protein for this round of directed evolution. Libraries of engineered genes were produced using established techniques (e.g., saturation mutagenesis, recombination of previously identified beneficial mutations). The polypeptides encoded by each gene were produced in HTP as described in Example 4, and the soluble heat-treated cell lysate was generated as described in Example 6, with a lysis temperature of 63.5° C. or 65° C. The clarified lysate was used to detect ribonuclease inhibitor activity as described in Example 7.

[0397] Each sample was evaluated by its residual RNase inhibition activity after heat treatment relative to SEQ ID NO: 360 (activity fold improvement over positive control, FIOP). In this example, activity FIOP is the ratio of SEQ ID NO:360's RFU to the given sample's RFU, both measured after the first qPCR incubation cycle. Activity FIOPs are shown in Tables 12.1 and 12.2.

TABLE 12.1 RNase Inhibitor Activity of
Variants Relative to SEQ ID NO: 360

| | | Activity FIOP after |
|---|---|---|
| SEQ ID | | 63.5° C. heat treatment |
| NO: | Amino Acid Differences | (Relative to SEQ ID NO: |
| (nt/aa) | (Relative to SEQ ID NO: 360) | 360) |
| 391/392 | A319T | +++ |
| 393/394 | S37C | +++ |
| 395/396 | Q60K | +++ |
| 397/398 | S342A | +++ |
| 399/400 | S342M | +++ |
| 401/402 | H81V | ++ |
| 403/404 | H81M | ++ |
| 405/406 | M50S | ++ |
| 407/408 | A395L | ++ |
| 409/410 | S64R | ++ |
| 411/412 | R177T | ++ |
| 413/414 | T107D | ++ |
| 415/416 | M50Q | + |
| 417/418 | S37A | + |
| 419/420 | S373A | + |
| 421/422 | A319G | + |
| 423/424 | A205L | + |
| 425/426 | A205I | + |
| 427/428 | A205V | + |
| 429/430 | Q35R | + |
| 431/432 | A78K | + |
| 433/434 | R228L | + |
| 435/436 | H178D | + |
| 437/438 | R285K | + |

¹ Levels of increased activity were determined relative to the reference polypeptide of SEQ ID NO: 360 and defined as follows: “+” 1.14 to 1.22-fold increased activity; “++” >1.22-fold increased activity; “+++” >1.28-fold increased activity.

TABLE 12.2 RNase Inhibitor Activity of Variants Relative to SEQ ID NO: 360

| | | Activity FIOP after 65° C. |
|---|---|---|
| SEQ ID | Amino Acid Differences | heat treatment (Relative |
| NO: (nt/aa) | (Relative to SEQ ID NO: 360) | to SEQ ID NO: 360) |
| 439/440 | S37A/S142Q/Q148N/D203E/A205P/R285Q/A319G | +++ |
| 441/442 | M50S/H81T/P90G/E124A/P147E/Q148N/D203E/A205P/R285Q | +++ |
| 443/444 | T66I/P90G/Q148N/R285Q/E317S/A319G | +++ |
| 445/446 | T28H/S37A/T91K/S142Q/A205P/R285Q | +++ |
| 447/448 | M50S/T91K/E124A/S142Q/P147E/Q148N/D203E/A205P/E317S/A319G | +++ |
| 449/450 | M50S/T66I/P90G/T91K/E124A/S142Q/R285Q/E317S | +++ |
| 451/452 | P147E/Q148N/D203E/R285Q/E317S/A319G | +++ |
| 453/454 | M50S/T66I/H81T/P90G/A205P/A319G | +++ |
| 455/456 | M50S/T66I/E124A/D203E/A205P/E317S/A319G | +++ |
| 457/458 | T28H/T66I/L84I/P90G/T91K/S142Q/A205P/A319G | +++ |
| 459/460 | S37A/T91K/Q148N/A205P/A319G | +++ |
| 461/462 | T28H/T66I/H81T/E124A/P147E/R285Q/A319G | ++ |
| 463/464 | T28H/M50S/T66I/L84I/P90G/P147E/D203E/A205P/E317S | ++ |
| 465/466 | T28H/M50S/P90G/T91K/E124A/S142Q/A319G | ++ |
| 467/468 | S37A/H81T/P147E/Q148N/D203E/A205P | ++ |
| 469/470 | T28H/T66I/H81T/P90G/T91K/E124A/D203E/R285Q/E317S/A319G | ++ |
| 471/472 | T28H/M50S/T66I/H81T/P90G/T91K/Q138L/P147E/Q148N/A205P/R285Q/A319G | ++ |
| 473/474 | T28H/S37A/M50S/E124A/A319G | ++ |
| 475/476 | H81T/P90G/T91K/E124A/R285Q/E317S | ++ |
| 477/478 | M50S/P90G/S142Q/D203E/R285Q | ++ |
| 479/480 | M50S/P90G/E124A/S142Q/A205P/R285Q/A319G | ++ |
| 481/482 | T28H/T66I/P90G/T91K/P147E/Q148N/A205P/A319G/W326L | ++ |
| 483/484 | T66I/H81T/A319G | ++ |
| 485/486 | T28H/T66I/P90G/D203E/A205P/A319G | ++ |
| 487/488 | M50S/T66I/P90G/T91K/A205P | ++ |
| 489/490 | M50S/T66I/P147E/A205P | ++ |
| 491/492 | S37A/H81T/R285Q | ++ |
| 493/494 | M50S/T66I/P90G/T91K/A319G | ++ |
| 495/496 | M50S/P147E/D203E/R285Q | + |
| 497/498 | S37A/M50S/H81T/Q148N | + |
| 499/500 | T28H/T66I/S142Q/A319G | + |
| 501/502 | L15R/T28H/T66I/H81T/P90G/T91K/P147E/Q148N/A319G | + |
| 503/504 | L15R/T28H/H81T/P90G/T91K/S142Q/R285Q/E317S/A319G | + |
| 505/506 | L15R/T28H/S37A/M50S/T66I/E124A/P147E/Q148N/A205P/R285Q | + |
| 507/508 | L15R/T66I/H81T/P147E/Q148N | + |
| 509/510 | T66I/T91K/E124A/S142Q/P147E/Q148N | + |
| 511/512 | L15R/S37A/T66I/H81T/P147E/Q148N/E317S/A319G | + |
| 513/514 | L15R/M50S/P90G/T91K/E124A/S142Q/P147E/R285Q/E317S/A319G | + |
| 515/516 | L15R/M50S/P90G/T91K/S142Q/P147E/Q148N/D203E/A205P | + |
| 517/518 | L15R/T28H/H81T/S142Q/P147E/Q148N/R285Q/E317S/A319G | + |
| 519/520 | L15R/T28H/M50S/T66I/P90G/T91K/D203E/R285Q/A319G | + |
| 521/522 | L15R/T66I/P90G/T91K/P147E/Q148N/A205P/R285Q | + |
| 523/524 | L15R/T28H/P90G/T91K/S142Q/P147E/Q148N/R285Q/E317S/A319G | + |
| 525/526 | L15R/S37A/T91K/Q148N/R285Q/A319G | + |
| 527/528 | H81T/P147E/Q148N/D203E/A205P | + |
| 529/530 | P147E/Q148N/R285Q/A319G | + |
| 531/532 | L15R/M50S/P90G/P147E/Q148N | + |
| 533/534 | L15R/T66I/H81T/P90G/R285Q/A319G | + |
| 535/536 | M50S/H81T/P147E/Q148N/R285Q | + |
| 537/538 | S37A/P147E/Q148N/R285Q | + |
| 539/540 | L15R/S37A/T66I/L84V/P90G/T91K/D203E/R285Q/E317S | + |
| 541/542 | L15R/L84I/P90G/T91K/D203E/R285Q | + |
| 543/544 | S37A/P90G/T91K/P147E | + |
| 545/546 | P90G/T91K/A205P/E317S/A319G | + |
| 547/548 | M50S/Q148N/D203E/E317S | + |
| 549/550 | L15R/T28H/M50S/T66I/H81T/L84I/P90G/R285Q/E317S | + |
| 551/552 | L15R/H81T/P147E | + |
| 553/554 | L15R/R285Q | + |

¹ Levels of increased activity were determined relative to the reference polypeptide of SEQ ID NO: 360 and defined as follows: “+” 1.12 to 1.50-fold increased activity; “++” >1.50-fold increased activity; “+++” >1.67-fold increased activity.

### Example 13

Variants with Improvements Over SEQ ID NO: 442

[0398] SEQ ID NO: 442 as selected as the parent protein for this round of directed evolution. Libraries of engineered genes were produced using established techniques (e.g., saturation mutagenesis, recombination of previously identified beneficial mutations). The polypeptides encoded by each gene were produced in HTP as described in Example 4, and the soluble heat-treated cell lysate was generated as described in Example 6, with a lysis temperature of 66.7° C. or 67° C. The clarified lysate was used to detect ribonuclease inhibitor activity as described in Example 7.

[0399] Each sample was evaluated by its residual RNase inhibition activity after heat treatment relative to SEQ ID NO: 442 (activity fold improvement over positive control, FIOP). In this example, activity FIOP is the ratio of SEQ ID NO:442's RFU to the given sample's RFU, both measured after the indicated qPCR incubation cycle. Activity FIOPs are shown in Tables 13.1 and 13.2.

TABLE 13.1
RNase Inhibitor Activity of Variants Relative to SEQ ID NO: 442

| | | Activity FIOP after |
|---|---|---|
| SEQ ID | | 66.7° C. heat treatment, |
| NO: | Amino Acid Differences | second qPCR cycle (Relative |
| (nt/aa) | (Relative to SEQ ID NO: 442) | to SEQ ID NO: 442) |
| 667/668 | A78T/H260Y | +++ |
| 669/670 | S396A | +++ |
| 671/672 | T345S | +++ |
| 673/674 | S37C | +++ |
| 675/676 | S342H | +++ |
| 677/678 | A395V | +++ |
| 679/680 | Q367V | ++ |
| 681/682 | A395L | ++ |
| 683/684 | Q367L | ++ |
| 685/686 | E38A | ++ |
| 687/688 | T107V | ++ |
| 689/690 | R228K | ++ |
| 691/692 | H260L | ++ |
| 693/694 | S57V | ++ |
| 695/696 | S50M/R51H | ++ |
| 697/698 | Q338V | + |
| 699/700 | Q285R/P291E/G385A | + |
| 701/702 | A175F | + |
| 703/704 | Q60K | + |
| 705/706 | R228Q | + |
| 707/708 | V145S/E147P/N148Q | + |
| 709/710 | A395M | + |
| 711/712 | Q60S | + |
| 713/714 | R177V | + |
| 715/716 | Q367A | + |
| 717/718 | H260S | + |
| 719/720 | T28A | + |
| 721/722 | S118R | + |
| 723/724 | S64V | + |

¹ Levels of increased activity were determined relative to the reference polypeptide of SEQ ID NO: 442 and defined as follows: “+” 1.15 to 1.35-fold increased activity; “++” >1.35-fold increased activity; “+++” >1.50-fold increased activity.

TABLE 13.2
RNase Inhibitor Activity of Variants Relative to SEQ ID NO: 442

| | | Activity FIOP after 67° C. |
|---|---|---|
| SEQ ID | | heat treatment, third |
| NO: | Amino Acid Differences | qPCR cycle (Relative to |
| (nt/aa) | (Relative to SEQ ID NO: 442) | SEQ ID NO: 442) |
| 555/556 | S37A/Q60K/S142Q/K176S/R228L/P291S/E317S | +++ |
| 557/558 | Q60K/S64R/E317S/A319G/S342A | +++ |
| 559/560 | T66I/R228L/A319G/S342M/A395L | +++ |
| 561/562 | S37A/S142Q/P291S/E317S | +++ |
| 563/564 | S64R/T107D/S142Q/P291S/A319G/S342A/A395L | +++ |
| 565/566 | S37A/Q60K/E317S/A319G/S342A/A395L | +++ |
| 567/568 | S37A/Q60K/T107D/S142Q/K176S/E317S/A319G/S342M | +++ |
| 569/570 | S142Q/E317S/A319G/S342M/A395L | +++ |
| 571/572 | K176S/R228L/A319G/A395L | +++ |
| 573/574 | R228L/P291S/S342M/A395L | +++ |
| 575/576 | S64R/A395L | ++ |
| 577/578 | S64R/T107D/S142Q/K176S/R228L/A319G/S342M/A395L | ++ |
| 579/580 | A395E | ++ |
| 581/582 | Q60K/S64R/T107D/S142Q/P291S/A319G/S342M | ++ |
| 583/584 | S37A/T66I/T107D/P291S/E317S | ++ |
| 585/586 | S37A/T66I/T107D/E317S/A395L | ++ |
| 587/588 | S37A/R228L/E317S/A395L | ++ |
| 589/590 | S342A/A395L | ++ |
| 591/592 | T66I/S142Q/A319G/S342M/A395L | ++ |
| 593/594 | T66I/S142Q/R228L/A395L | ++ |
| 595/596 | C363M | ++ |
| 597/598 | S142Q/A395L | ++ |
| 599/600 | Q60K/S64R/R177T/P291S/A395L | ++ |
| 601/602 | T66I/A319G | ++ |
| 603/604 | S64R/T107D/R177T/R228L/P291S/E317S/A395L | ++ |
| 605/606 | S342M/A395L | + |
| 607/608 | S64R/S142Q/R177T/R228L/E317S | + |
| 609/610 | S37C | + |
| 611/612 | H260L | + |
| 613/614 | Q60K/R228L/E317S/A395L | + |
| 615/616 | Q60K/S64R/K176S/E317S/S342M | + |
| 617/618 | R177T/R228L/S342M/A395L | + |
| 619/620 | S64R/S142Q/R177T/E317S/A319G | + |
| 621/622 | Q60K/S64R/T107D/S342M | + |
| 623/624 | Q60K/T107D/S142Q/P291S/E317S/S342M/A395L | + |
| 625/626 | T66I/R228L/A319G | + |
| 627/628 | S64R/R228L/E317S/A319G | + |
| 629/630 | S168F | + |
| 631/632 | A319G/A395L | + |
| 633/634 | S37A/T107D/R228L | + |
| 635/636 | T66I/S142Q | + |
| 637/638 | S37A/S342M | + |
| 639/640 | Q60K/S64R/K176S/R228L/A395L | + |
| 641/642 | Q60K/S64R/S342M | + |
| 643/644 | Q35R | + |
| 645/646 | Q60K/T66I/A395L | + |
| 647/648 | A319G | + |
| 649/650 | P291S/E317S/A319G/S342M/A395L | + |
| 651/652 | S37A/R177T | + |
| 653/654 | T107V | + |
| 655/656 | S37A | + |
| 657/658 | S37A/Q60K/S64R/S142Q/P291S | + |
| 659/660 | S37A/Q60K/S142Q/R228L/P291S | + |
| 661/662 | Q60K/A319G/S342A | + |
| 663/664 | T66I/K176S/E317S/A319G/A395L | + |
| 665/666 | S37A/R177T/R228L | + |

¹ Levels of increased activity were determined relative to the reference polypeptide of SEQ ID NO: 442 and defined as follows: “+” 1.08 to 1.45-fold increased activity; “++” >1.45-fold increased activity; “+++” >1.60-fold increased activity.

### Example 14

Variants with Improvements Over SEQ ID NO: 578

[0400] SEQ ID NO: 578 as selected as the parent protein for this round of directed evolution. Libraries of engineered genes were produced using established techniques (e.g., saturation mutagenesis, recombination of previously identified beneficial mutations). The polypeptides encoded by each gene were produced in HTP as described in Example 4, and the soluble heat-treated cell lysate was generated as described in Example 6, with a lysis temperature of 69° C. or 71° C. The clarified lysate was used to detect ribonuclease inhibitor activity as described in Example 7.

[0401] Each sample was evaluated by its residual RNase inhibition activity after heat treatment relative to SEQ ID NO: 578 (activity fold improvement over positive control, FIOP). In this example, activity FIOP is the ratio of SEQ ID NO:578's RFU to the given sample's RFU, both measured after the third qPCR incubation cycle. Activity FIOPs are shown in Tables 14.1 and 14.2.

TABLE 14.1
RNase Inhibitor Activity of Variants Relative to SEQ ID NO: 578

| | | Activity FIOP |
|---|---|---|
| | | after 69° C. |
| SEQ ID | | heat treatment |
| NO: | Amino Acid Differences | (Relative to |
| (nt/aa) | (Relative to SEQ ID NO: 578) | SEQ ID NO: 578) |
| 725/726 | T28A/S118R/A175F/H260S/Q338V/Q367L | +++ |
| 727/728 | S118R/S168F/H260Y/S396A | +++ |
| 729/730 | E38A/Q60S/S168F/H260L/Q338V/Q367L | +++ |
| 731/732 | T28A/E38A/S57V/Q60S/H260L/C363M/Q367L | +++ |
| 733/734 | S57V/S118R/H260L/Q338V/Q367L | +++ |
| 735/736 | S57V/S118R/S168F/R177V/H260L/Q338V/Q367L | +++ |
| 737/738 | H260Y/S396A | +++ |
| 739/740 | T28A/S118R/S168F/H260L/Q367L/S396A | ++ |
| 741/742 | T28A/H260L/Q338V | ++ |
| 743/744 | T28A/Q60K/S168I/H260L | ++ |
| 745/746 | S57V/Q60K/S118R/A175F/R177V/H260L/Q338V | ++ |
| 747/748 | T28A/S57V/H260Y/Q338V/Q367L | ++ |
| 749/750 | Q35R/H260S/Q338V/Q367L | ++ |
| 751/752 | S118R/A175F/H260L/Q338V | ++ |
| 753/754 | S168F/H260L | ++ |
| 755/756 | S57V/Q60S/S168F/R177V/H260S/Q338V/Q367L | ++ |
| 757/758 | T28A/S168F/H260S/Q338V | ++ |
| 759/760 | H260Y/Q367L | + |
| 761/762 | T28A/S57V/L137V/H260L | + |
| 763/764 | E38A/Q60K/A175F/H260L/Q338V | + |
| 765/766 | E38A/Q60K/H260S/Q367A/S396A | + |
| 767/768 | S57V/Q60K/H260S/C363M/Q367V | + |
| 769/770 | Q60K/H260L/Q367A | + |
| 771/772 | T28A/E38A/Q60K/H260S/Q367L | + |
| 773/774 | Q60S/S168F | + |
| 775/776 | H260L/C363M/Q367A | + |
| 777/778 | R177V/H260Y/C363M/Q367V | + |
| 779/780 | E38A/H260L | + |
| 781/782 | T28A/Q60K/S118R/R177V/H260Y | + |
| 783/784 | T28A/Q35R/Q60S/S118R/A175F/H260Y | + |
| 785/786 | Q60S/Q367L | + |
| 787/788 | T28A/Q60S/S118R | + |
| 789/790 | S57V/S118R | + |

¹ Levels of increased activity were determined relative to the reference polypeptide of SEQ ID NO: 578 and defined as follows: “+” 1.14 to 1.65-fold increased activity; “++” >1.65-fold increased activity; “+++” >1.78-fold increased activity.

TABLE 14.2
RNase Inhibitor Activity of Variants Relative to SEQ ID NO: 578

| SEQ ID | | Activity FIOP after 71° C. |
|---|---|---|
| NO: | Amino Acid Differences | heat treatment (Relative |
| (nt/aa) | (Relative to SEQ ID NO: 578) | to SEQ ID NO: 578) |
| 791/792 | S118R/H260L/Q338V/S396A | ++ |
| 739/740 | T28A/S118R/S168F/H260L/Q367L/S396A | ++ |
| 793/794 | T28A/E38A/S57V/Q60K/S118R/R177V/H260Y/Q338V/ | ++ |
| | C363M/Q367L/S396A | ++ |
| 795/796 | T28A/E38A/Q60S/H260L/C363M/Q367L | ++ |
| 797/798 | T28A/Q35R/E38A/S57V/S118R/H260L/C363M/Q367L | ++ |
| 799/800 | T28A/S57V/Q60S/S168F/H260L/Q367A | ++ |
| 801/802 | S168F/A175F/H260L/Q338V/Q367L | ++ |
| 803/804 | S57V/Q60S/S168F/H260Y/Q338V/C363M/Q367V/S396A | ++ |
| 805/806 | Q60S/S168F/C363M/Q367L/S396A | ++ |
| 807/808 | T28A/E38A/S57V/Q60K/S118R/S168F/H260L/Q367L | ++ |
| 809/810 | T28A/A175F/H260L/Q367L | + |
| 731/732 | T28A/E38A/S57V/Q60S/H260L/C363M/Q367L | + |
| 811/812 | Q60S/C363M/Q367L/S396A | + |
| 813/814 | H260S/Q338V/Q367L | + |
| 815/816 | T28A/S57V/H260Y/Q338V/C363M/Q367L | + |
| 817/818 | S168F/H260L/Q367L | + |
| 819/820 | Q367L/S396A | + |
| 821/822 | T28A/Q35R/A175F/H260Y/Q367L/S396A | + |
| 823/824 | S57V/Q60K/S168F/H260L/Q367L | + |

¹ Levels of increased activity were determined relative to the reference polypeptide of SEQ ID NO: 578 and defined as follows: “+” 1.19 to 1.54-fold increased activity; “++” >1.54-fold increased activity

[0402] While the invention has been described with reference to the specific embodiments, various changes can be made and equivalents can be substituted to adapt to a particular situation, material, composition of matter, process, process step or steps, thereby achieving benefits of the invention without departing from the scope of what is claimed.

[0403] For all purposes, each and every publication and patent document cited in this disclosure is incorporated herein by reference as if each such publication or document was specifically and individually indicated to be incorporated herein by reference. Citation of publications and patent documents is not intended as an indication that any such document is pertinent prior art, nor does it constitute an admission as to its contents or date.

APPENDIX

| SEQ ID NO: | Amino Acid Differences |
|---|---|
| (nt/aa) | (Relative to SEQ ID NO: 2) |
| 25/26 | R257F/G459E |
| 27/28 | T345A |
| 29/30 | R257F |
| 31/32 | M296L |
| 33/34 | P113G |
| 35/36 | R95E/M296L/G459E |
| 37/38 | R257V |
| 39/40 | R95Q/R257F/M296I |
| 41/42 | S453M |
| 43/44 | T107I/V267K |
| 45/46 | M417L/I422V/G459E |
| 47/48 | A395L |
| 49/50 | A390S |
| 51/52 | R257G/M296I |
| 53/54 | D243C |
| 55/56 | V156M/R257S |
| 57/58 | V351R |
| 59/60 | T348K |
| 61/62 | C363E |
| 63/64 | S453R |
| 65/66 | R95E/R257F/M296I/I422V |
| 67/68 | A395C |
| 69/70 | I94L/T121S/F332L/A390T/V466I |
| 71/72 | R257G/M417L/E419D/G459E |
| 73/74 | N452R |
| 75/76 | R95E/R257F/M296I |
| 77/78 | A377S/A390T |
| 79/80 | S453F |
| 81/82 | N452K |
| 83/84 | D272N |
| 85/86 | D243S |
| 87/88 | Y126V/D386G |
| 89/90 | V267H |
| 91/92 | A390G |
| 93/94 | E430L |
| 95/96 | S453L |
| 97/98 | S453A |
| 99/100 | V230L/V429L |
| 101/102 | A377S/A390S |
| 103/104 | R257T |
| 105/106 | G459K |
| 107/108 | D272Q |
| 109/110 | E430G |
| 111/112 | S453K |
| 113/114 | V83L/T107I/V230L/V267T/V429L |
| 115/116 | V267R |
| 117/118 | T107I/V429L |
| 119/120 | D243R |
| 121/122 | D243M |
| 123/124 | T107A/Q323E/V429L |
| 125/126 | I94L/T121S/I265L/A390T |
| 127/128 | V400L |
| 129/130 | S453W |
| 131/132 | V351K |
| 133/134 | V429L |
| 135/136 | R257F/M296I |
| 137/138 | A395I |
| 139/140 | G459M |
| 141/142 | H81F |
| 143/144 | R95E/M296L/Q323E/A390S/V429L/G459E |
| 145/146 | R95E/R257F/M296L/Q323E/V429L/G459E |
| 147/148 | R95E/R257F/M296L/A390S/G459E |
| 149/150 | R95E/R257F/M296L/Q323E/A390T/G459E |
| 151/152 | R95E/R257F/M296L/Q323E/A390S/V429L/G459E |
| 153/154 | R95E/R257F/M296L/V429L/G459E |
| 155/156 | R95E/R257F/M296L/A377T/A390T/G459E |
| 157/158 | R95E/A135V/R257F/M296L/Q323E/A377S/A390T/G459E |
| 159/160 | R95E/M296L/Q323E/A377T/A390S/V429L/G459E |
| 161/162 | R95E/R257F/M296L/Q323E/A390S/G459E |
| 163/164 | R95E/R257F/M296L/Q323E/A377S/A390S/G459E |
| 165/166 | R95E/R257F/M296L/Q323E/A377T/A390T/G459E |
| 167/168 | R95E/R257F/M296L/A377S/V429L/G459E |
| 169/170 | R95E/R257F/M296L/A390T/G459E |
| 171/172 | R95E/Y158C/R257F/M296L/Q323E/A377T/A390S/G459E |
| 173/174 | R95E/R257F/M296L/A377T/V429L/G459E |
| 175/176 | R95E/R257F/M296L/A377S/A390S/G459E |
| 177/178 | R95E/R257F/M296L/Q323E/A377S/A390T/G459E |
| 179/180 | R95E/R257F/M296L/Q323E/A377T/V429L/G459E |
| 181/182 | R95E/E167K/R257F/M296L/Q323E/A390S/V429L/G459E |
| 183/184 | R95E/M296L/Q323E/A390T/V429L/G459E |
| 185/186 | R95E/R257F/M296L/Q323E/A390T/V429L/G459E |
| 187/188 | R95E/M296L/A377T/A390S/V429L/G459E |
| 189/190 | R95E/R257F/M296L/A377T/A390S/G459E |
| 191/192 | R95E/M296L/A377T/A390S/G459E |
| 193/194 | R95E/R257F/M296L/Q323E/A377S/A390S/V429L/G459E |
| 195/196 | R95E/R257F/M296L/Q323E/A377S/A390T/V429L/G459E |
| 197/198 | R95E/R257F/M296L/Q323E/A377S/V429L/G459E |
| 199/200 | R95E/R257F/M296L/A377S/G459E |
| 201/202 | R95E/M296L/A390T/V429L/G459E |
| 203/204 | R95E/R257F/M296L/Q323E/A377T/A390S/G459E |
| 205/206 | R95E/R257F/M296L/Q323E/A377T/A390S/V429L/G459E |
| 207/208 | R95E/R257F/M296L/A377T/A390T/V429L/G459E |
| 209/210 | R95E/R257F/M296L/A390T/V429L/G459E |
| 211/212 | R95E/R257F/M296L/A377T/A390S/V429L/G459E |
| 213/214 | R95E/R257F/M296L/A377S/A390T/G459E |
| 215/216 | R95E/R257F/M296L/A377S/A390T/V429L/G459E |
| 217/218 | R95E/R257F/M296L/A390S/V429L/G459E |
| 219/220 | R95E/M296L/A377S/A390T/G459E |
| 221/222 | R95E/M296L/A390T/G459E |
| 223/224 | R95E/D243S/M296L/C363E/A390G/G459E |
| 225/226 | R95E/P113G/R257F/M296L/V351K/C363E/V429L/G459E |
| 227/228 | R95E/P113G/R257V/M296L/V351K/A390S/E430G/G459E |
| 229/230 | R95E/P113G/R257V/D272N/M296L/A390S/G459E |
| 231/232 | R95E/P113G/D243M/M296L/V351K/A390S/V429L/G459E |
| 233/234 | R95E/R257V/D272N/M296L/T345A/T348K/G459E |
| 235/236 | R95E/D243S/R257T/M296L/V351R/A390S/G459E |
| 237/238 | R95E/P113G/D243M/R257T/D272N/M296L/A390G/G459E |
| 239/240 | R95E/R257T/D272Q/M296L/C363E/A390G/E430L/G459E |
| 241/242 | R95E/R257V/M296L/V351K/A390G/G459E |
| 243/244 | R95E/P113G/D243S/M296L/A390G/E430G/G459E |
| 245/246 | R95E/P113G/R257V/V267H/M296L/V351R/C363E/V400L/E430L/G459E |
| 247/248 | R95E/P113G/D243M/R257V/M296L/V351R/E430G/G459E |
| 249/250 | R95E/D243M/V267R/M296L/S341C/A390G/A395L/G459E |
| 251/252 | R95E/P113G/D243M/R257T/M296L/T345A/T348K/G459E |
| 253/254 | R95E/P113G/D243S/R257F/M296L/T348K/A390G/G459E |
| 255/256 | R95E/D243S/M296L/T345A/T348K/A390G/G459E |
| 257/258 | R95E/P113G/D243M/R257V/M296L/T345A/E430L/G459E |
| 259/260 | R95E/R257T/M296L/T345A/T348K/V351R/A390S/V429L/E430G/G459E |
| 261/262 | R95E/D272Q/M296L/T345A/A390G/V429L/E430L/G459E |
| 263/264 | R95E/D243M/V267R/M296L/V351K/G459E |
| 265/266 | R95E/D243R/D272N/M296L/T345A/A390G/G459E |
| 267/268 | R95E/P113G/R257T/M296L/C363E/A390G/G459E |
| 269/270 | R95E/D243S/M296L/A390G/V429L/G459E |
| 271/272 | R95E/P113G/D243M/R257F/M296L/V351K/A390G/G459E |
| 273/274 | R95E/P113G/D243M/D272Q/M296L/T345A/T348K/E430G/G459E |
| 275/276 | R95E/D243M/V267R/D272Q/M296L/T348K/A390G/G459E |
| 277/278 | R95E/P113G/R257T/D272Q/M296L/T345A/T348K/C363E/E430L/G459E |
| 279/280 | R95E/P113G/D243R/M296L/A390G/V429L/E430L/G459E |
| 281/282 | R95E/P113G/D243M/R257F/D272N/M296L/V351R/C363E/G459E |
| 283/284 | R95E/D243M/D272Q/M296L/T345A/T348K/C363E/A390S/A395L/G459E |
| 285/286 | R95E/P113G/D243M/D272Q/M296L/V351R/C363E/A390S/A395L/G459E |
| 287/288 | R95E/P113G/D243R/R257V/D272Q/M296L/T345A/A390S/E430L/G459E |
| 289/290 | R95E/P113G/D243S/V267R/D272Q/M296L/C363E/A390S/E430G/G459E |
| 291/292 | R95E/P113G/D243M/V267R/M296L/T348K/C363E/E430L/G459E |
| 293/294 | R95E/P113G/D243S/R257T/M296L/V351R/A390G/E430L/G459E |
| 295/296 | R95E/P113G/D243S/R257T/D272N/M296L/V351K/A390S/G459E |
| 297/298 | R95E/P113G/D243R/V267R/M296L/A390G/E430G/G459E |
| 299/300 | R95E/D243R/R257F/M296L/T348K/A395L/E430G/G459E |
| 301/302 | R95E/D243R/M296L/T345A/T348K/V429L/E430L/G459E |
| 303/304 | R95E/D243M/R257F/M296L/T345A/T348K/A395L/G459E |
| 305/306 | R95E/D243S/R257T/D272N/M296L/V351K/V400L/V429L/G459E |
| 307/308 | R95E/P113G/D243M/V267R/M296L/G459E |
| 309/310 | R95E/D243M/V267R/M296L/V351R/G459E |
| 311/312 | R95E/P113G/M296L/A390S/E430G/G459E |
| 313/314 | R95E/D243S/V267R/M296L/V351K/V400L/G459E |
| 315/316 | R95E/M296L/V429L/E430G/G459E |
| 317/318 | R95E/P113G/D243M/R257T/D272N/M296L/Q323E/A390G/S453K/G459E |
| 319/320 | R95E/P113G/D243M/R257T/D272N/M296L/Q323E/T348K/A390G/N452R/G459E |
| 321/322 | R95E/P113G/D243M/R257T/D272N/M296L/A390G/N452R/S453A/G459E |
| 323/324 | R95E/P113G/D243M/R257T/D272N/M296L/Q323E/V351R/A390G/E430L/N452R/ |
| | S453A/G459E |
| 325/326 | R95E/P113G/D243M/R257T/D272N/E291P/M296L/A390G/G459E |
| 327/328 | R95E/P113G/L145E/D243M/R257T/D272N/M296L/A390G/G459E |
| 329/330 | R95E/P113G/G228A/D243M/R257T/D272N/M296L/A390G/G459E |
| 331/332 | R95E/P113G/D243M/R257T/D272N/M296L/Q323E/A390G/V429L/G459E |
| 333/334 | R95E/P113G/L145G/D243M/R257T/D272N/M296L/A390G/G459E |
| 335/336 | R95E/P113G/L145M/D243M/R257T/D272N/M296L/A390G/G459E |
| 337/338 | E38T/R95E/P113G/D243M/R257T/D272N/M296L/A390G/G459E |
| 339/340 | R95E/P113G/H150Q/D243M/R257T/D272N/M296L/A390G/G459E |
| 341/342 | R95E/P113G/G228R/D243M/R257T/D272N/M296L/A390G/G459E |
| 343/344 | T12K/R95E/P113G/D243M/R257T/D272N/M296L/A390G/G459E |
| 345/346 | R95E/P113G/L173I/D243M/R257T/D272N/M296L/A390G/G459E |
| 347/348 | E38C/R95E/P113G/Q237R/D243M/R257T/D272N/M296L/A390G/G459E |
| 349/350 | V40I/R95E/P113G/D243M/R257T/D272N/M296L/A390G/G459E |
| 351/352 | E38R/R95E/P113G/D243M/R257T/D272N/M296L/A390G/G459E |
| 353/354 | M13T/R95E/P113G/L145M/G228A/D243M/R257T/D272N/E291P/M296L/Q323E/ |
| | V351R/A390G/N452R/G459E |
| 355/356 | R95E/P113G/D243M/R257T/D272N/M296L/Q323E/T348K/A390G/N452R/S453R/ |
| | G459E |
| 357/358 | T12K/M13T/R95E/P113G/D243M/R257T/D272N/M296L/Q323E/T348K/A390G/ |
| | N452R/S453R/G459E |
| 359/360 | R95E/P113G/L145V/G228R/D243M/R257T/D272N/E291P/M296L/Q323E/T348K/ |
| | A390G/N452R/S453R/G459E |
| 361/362 | M13T/R95E/P113G/L145V/D243M/R257T/D272N/M296L/Q323E/T348K/A390G/ |
| | N452R/S453R/G459E |
| 363/364 | R95E/P113G/L145M/G228R/D243M/R257T/D272N/E291P/M296L/Q323E/T348K/ |
| | A390G/N452R/S453R/G459E |
| 365/366 | R95E/P113G/L145V/D243M/R257T/D272N/E291P/M296L/Q323E/T348K/A390G/ |
| | N452R/S453R/G459E |
| 367/368 | E38T/R95E/P113G/L145V/D243M/R257T/D272N/M296L/Q323E/T348K/A390G/ |
| | N452R/S453R/G459E |
| 369/370 | T12K/R95E/P113G/L145M/D243M/R257T/D272N/M296L/Q323E/T348K/A390G/ |
| | N452R/S453R/G459E |
| 371/372 | R95E/P113G/D243M/R257T/D272N/M296L/Q323E/T348K/A390G/N452R/S453K/ |
| | G459E |
| 373/374 | E38T/R95E/P113G/L145I/G228A/D243M/R257T/D272N/M296L/Q323E/T348K/ |
| | A390G/N452R/S453R/G459E |
| 375/376 | L15R/T28H/H81T/R95E/P113G/E124A/A221S/D243M/R257T/D272N/R285Q/M296L/ |
| | E317S/Q323E/T348K/A390G/N452R/G459E |
| 377/378 | L15R/T28H/S64V/R95E/P113G/D203E/A221S/D243M/R257T/D272N/R285Q/M296L/ |
| | E317S/Q323E/T348K/A390G/N452R/G459E |
| 379/380 | L15R/S57M/H81T/R95E/P113G/E124A/Q148N/D203E/D243M/R257T/D272N/M296L/ |
| | Q323E/T348K/A390G/N452R/G459E |
| 381/382 | T12K/R95E/P113G/D243M/R257T/D272N/M296L/Q323E/T348K/A390G/N452R/ |
| | S453K/G459E |
| 383/384 | S56A/S57T/S64V/H81T/T91K/R95E/P113G/E124A/D203E/D243M/R257T/D272N/ |
| | R285Q/M296L/E317S/Q323E/T348K/A390G/N452R/G459E |
| 385/386 | T66I/P90G/R95E/P113G/S142H/K176S/A205P/D243M/R257T/D272N/M296L/A319G/ |
| | Q323E/T348K/A390G/N452R/G459E |
| 387/388 | R95E/P113G/G228R/D243M/R257T/D272N/M296L/Q323E/T348K/A390G/N452R/ |
| | S453K/G459E |
| 389/390 | R95E/P113G/L145I/G228A/D243M/R257T/D272N/M296L/Q323E/T348K/A390G/ |
| | N452R/S453A/G459E |
| 391/392 | R95E/P113G/L145V/G228R/D243M/R257T/D272N/E291P/M296L/A319T/Q323E/ |
| | T348K/A390G/N452R/S453R/G459E |
| 393/394 | S37C/R95E/P113G/L145V/G228R/D243M/R257T/D272N/E291P/M296L/Q323E/ |
| | T348K/A390G/N452R/S453R/G459E |
| 395/396 | Q60K/R95E/P113G/L145V/G228R/D243M/R257T/D272N/E291P/M296L/Q323E/ |
| | T348K/A390G/N452R/S453R/G459E |
| 397/398 | R95E/P113G/L145V/G228R/D243M/R257T/D272N/E291P/M296L/Q323E/S342A/ |
| | T348K/A390G/N452R/S453R/G459E |
| 399/400 | R95E/P113G/L145V/G228R/D243M/R257T/D272N/E291P/M296L/Q323E/S342M/ |
| | T348K/A390G/N452R/S453R/G459E |
| 401/402 | H81V/R95E/P113G/L145V/G228R/D243M/R257T/D272N/E291P/M296L/Q323E/ |
| | T348K/A390G/N452R/S453R/G459E |
| 403/404 | H81M/R95E/P113G/L145V/G228R/D243M/R257T/D272N/E291P/M296L/Q323E/ |
| | T348K/A390G/N452R/S453R/G459E |
| 405/406 | M50S/R95E/P113G/L145V/G228R/D243M/R257T/D272N/E291P/M296L/Q323E/ |
| | T348K/A390G/N452R/S453R/G459E |
| 407/408 | R95E/P113G/L145V/G228R/D243M/R257T/D272N/E291P/M296L/Q323E/T348K/ |
| | A390G/A395L/N452R/S453R/G459E |
| 409/410 | S64R/R95E/P113G/L145V/G228R/D243M/R257T/D272N/E291P/M296L/Q323E/ |
| | T348K/A390G/N452R/S453R/G459E |
| 411/412 | R95E/P113G/L145V/R177T/G228R/D243M/R257T/D272N/E291P/M296L/Q323E/ |
| | T348K/A390G/N452R/S453R/G459E |
| 413/414 | R95E/T107D/P113G/L145V/G228R/D243M/R257T/D272N/E291P/M296L/Q323E/ |
| | T348K/A390G/N452R/S453R/G459E |
| 415/416 | M50Q/R95E/P113G/L145V/G228R/D243M/R257T/D272N/E291P/M296L/Q323E/ |
| | T348K/A390G/N452R/S453R/G459E |
| 417/418 | S37A/R95E/P113G/L145V/G228R/D243M/R257T/D272N/E291P/M296L/Q323E/ |
| | T348K/A390G/N452R/S453R/G459E |
| 419/420 | R95E/P113G/L145V/G228R/D243M/R257T/D272N/E291P/M296L/Q323E/T348K/ |
| | S373A/A390G/N452R/S453R/G459E |
| 421/422 | R95E/P113G/L145V/G228R/D243M/R257T/D272N/E291P/M296L/A319G/Q323E/ |
| | T348K/A390G/N452R/S453R/G459E |
| 423/424 | R95E/P113G/L145V/A205L/G228R/D243M/R257T/D272N/E291P/M296L/Q323E/ |
| | T348K/A390G/N452R/S453R/G459E |
| 425/426 | R95E/P113G/L145V/A205I/G228R/D243M/R257T/D272N/E291P/M296L/Q323E/ |
| | T348K/A390G/N452R/S453R/G459E |
| 427/428 | R95E/P113G/L145V/A205V/G228R/D243M/R257T/D272N/E291P/M296L/Q323E/ |
| | T348K/A390G/N452R/S453R/G459E |
| 429/430 | Q35R/R95E/P113G/L145V/G228R/D243M/R257T/D272N/E291P/M296L/Q323E/ |
| | T348K/A390G/N452R/S453R/G459E |
| 431/432 | A78K/R95E/P113G/L145V/G228R/D243M/R257T/D272N/E291P/M296L/Q323E/ |
| | T348K/A390G/N452R/S453R/G459E |
| 433/434 | R95E/P113G/L145V/G228L/D243M/R257T/D272N/E291P/M296L/Q323E/T348K/ |
| | A390G/N452R/S453R/G459E |
| 435/436 | R95E/P113G/L145V/H178D/G228R/D243M/R257T/D272N/E291P/M296L/Q323E/ |
| | T348K/A390G/N452R/S453R/G459E |
| 437/438 | R95E/P113G/L145V/G228R/D243M/R257T/D272N/R285K/E291P/M296L/Q323E/ |
| | T348K/A390G/N452R/S453R/G459E |
| 439/440 | S37A/R95E/P113G/S142Q/L145V/Q148N/D203E/A205P/G228R/D243M/R257T/ |
| | D272N/R285Q/E291P/M296L/A319G/Q323E/T348K/A390G/N452R/S453R/G459E |
| 441/442 | M50S/H81T/P90G/R95E/P113G/E124A/L145V/P147E/Q148N/D203E/A205P/G228R/ |
| | D243M/R257T/D272N/R285Q/E291P/M296L/Q323E/T348K/A390G/N452R/S453R/ |
| | G459E |
| 443/444 | T66I/P90G/R95E/P113G/L145V/Q148N/G228R/D243M/R257T/D272N/R285Q/E291P/ |
| | M296L/E317S/A319G/Q323E/T348K/A390G/N452R/S453R/G459E |
| 445/446 | T28H/S37A/T91K/R95E/P113G/S142Q/L145V/A205P/G228R/D243M/R257T/D272N/ |
| | R285Q/E291P/M296L/Q323E/T348K/A390G/N452R/S453R/G459E |
| 447/448 | M50S/T91K/R95E/P113G/E124A/S142Q/L145V/P147E/Q148N/D203E/A205P/G228R/ |
| | D243M/R257T/D272N/E291P/M296L/E317S/A319G/Q323E/T348K/A390G/N452R/ |
| | S453R/G459E |
| 449/450 | M50S/T66I/P90G/T91K/R95E/P113G/E124A/S142Q/L145V/G228R/D243M/R257T/ |
| | D272N/R285Q/E291P/M296L/E317S/Q323E/T348K/A390G/N452R/S453R/G459E |
| 451/452 | R95E/P113G/L145V/P147E/Q148N/D203E/G228R/D243M/R257T/D272N/R285Q/ |
| | E291P/M296L/E317S/A319G/Q323E/T348K/A390G/N452R/S453R/G459E |
| 453/454 | M50S/T66I/H81T/P90G/R95E/P113G/L145V/A205P/G228R/D243M/R257T/D272N/ |
| | E291P/M296L/A319G/Q323E/T348K/A390G/N452R/S453R/G459E |
| 455/456 | M50S/T66I/R95E/P113G/E124A/L145V/D203E/A205P/G228R/D243M/R257T/D272N/ |
| | E291P/M296L/E317S/A319G/Q323E/T348K/A390G/N452R/S453R/G459E |
| 457/458 | T28H/T66I/L84I/P90G/T91K/R95E/P113G/S142Q/L145V/A205P/G228R/D243M/ |
| | R257T/D272N/E291P/M296L/A319G/Q323E/T348K/A390G/N452R/S453R/G459E |
| 459/460 | S37A/T91K/R95E/P113G/L145V/Q148N/A205P/G228R/D243M/R257T/D272N/E291P/ |
| | M296L/A319G/Q323E/T348K/A390G/N452R/S453R/G459E |
| 461/462 | T28H/T66I/H81T/R95E/P113G/E124A/L145V/P147E/G228R/D243M/R257T/D272N/ |
| | R285Q/E291P/M296L/A319G/Q323E/T348K/A390G/N452R/S453R/G459E |
| 463/464 | T28H/M50S/T66I/L84I/P90G/R95E/P113G/L145V/P147E/D203E/A205P/G228R/D243M/ |
| | R257T/D272N/E291P/M296L/E317S/Q323E/T348K/A390G/N452R/S453R/G459E |
| 465/466 | T28H/M50S/P90G/T91K/R95E/P113G/E124A/S142Q/L145V/G228R/D243M/R257T/ |
| | D272N/E291P/M296L/A319G/Q323E/T348K/A390G/N452R/S453R/G459E |
| 467/468 | S37A/H81T/R95E/P113G/L145V/P147E/Q148N/D203E/A205P/G228R/D243M/R257T/ |
| | D272N/E291P/M296L/Q323E/T348K/A390G/N452R/S453R/G459E |
| 469/470 | T28H/T66I/H81T/P90G/T91K/R95E/P113G/E124A/L145V/D203E/G228R/D243M/ |
| | R257T/D272N/R285Q/E291P/M296L/E317S/A319G/Q323E/T348K/A390G/N452R/S453R/ |
| | G459E |
| 471/472 | T28H/M50S/T66I/H81T/P90G/T91K/R95E/P113G/Q138L/L145V/P147E/Q148N/A205P/ |
| | G228R/D243M/R257T/D272N/R285Q/E291P/M296L/A319G/Q323E/T348K/A390G/ |
| | N452R/S453R/G459E |
| 473/474 | T28H/S37A/M50S/R95E/P113G/E124A/L145V/G228R/D243M/R257T/D272N/E291P/ |
| | M296L/A319G/Q323E/T348K/A390G/N452R/S453R/G459E |
| 475/476 | H81T/P90G/T91K/R95E/P113G/E124A/L145V/G228R/D243M/R257T/D272N/R285Q/ |
| | E291P/M296L/E317S/Q323E/T348K/A390G/N452R/S453R/G459E |
| 477/478 | M50S/P90G/R95E/P113G/S142Q/L145V/D203E/G228R/D243M/R257T/D272N/R285Q/ |
| | E291P/M296L/Q323E/T348K/A390G/N452R/S453R/G459E |
| 479/480 | M50S/P90G/R95E/P113G/E124A/S142Q/L145V/A205P/G228R/D243M/R257T/D272N/ |
| | R285Q/E291P/M296L/A319G/Q323E/T348K/A390G/N452R/S453R/G459E |
| 481/482 | T28H/T66I/P90G/T91K/R95E/P113G/L145V/P147E/Q148N/A205P/G228R/D243M/ |
| | R257T/D272N/E291P/M296L/A319G/Q323E/W326L/T348K/A390G/N452R/S453R/G459E |
| 483/484 | T66I/H81T/R95E/P113G/L145V/G228R/D243M/R257T/D272N/E291P/M296L/A319G/ |
| | Q323E/T348K/A390G/N452R/S453R/G459E |
| 485/486 | T28H/T66I/P90G/R95E/P113G/L145V/D203E/A205P/G228R/D243M/R257T/D272N/ |
| | E291P/M296L/A319G/Q323E/T348K/A390G/N452R/S453R/G459E |
| 487/488 | M50S/T66I/P90G/T91K/R95E/P113G/L145V/A205P/G228R/D243M/R257T/D272N/ |
| | E291P/M296L/Q323E/T348K/A390G/N452R/S453R/G459E |
| 489/490 | M50S/T66I/R95E/P113G/L145V/P147E/A205P/G228R/D243M/R257T/D272N/E291P/ |
| | M296L/Q323E/T348K/A390G/N452R/S453R/G459E |
| 491/492 | S37A/H81T/R95E/P113G/L145V/G228R/D243M/R257T/D272N/R285Q/E291P/M296L/ |
| | Q323E/T348K/A390G/N452R/S453R/G459E |
| 493/494 | M50S/T66I/P90G/T91K/R95E/P113G/L145V/G228R/D243M/R257T/D272N/E291P/ |
| | M296L/A319G/Q323E/T348K/A390G/N452R/S453R/G459E |
| 495/496 | M50S/R95E/P113G/L145V/P147E/D203E/G228R/D243M/R257T/D272N/R285Q/E291P/ |
| | M296L/Q323E/T348K/A390G/N452R/S453R/G459E |
| 497/498 | S37A/M50S/H81T/R95E/P113G/L145V/Q148N/G228R/D243M/R257T/D272N/E291P/ |
| | M296L/Q323E/T348K/A390G/N452R/S453R/G459E |
| 499/500 | T28H/T66I/R95E/P113G/S142Q/L145V/G228R/D243M/R257T/D272N/E291P/M296L/ |
| | A319G/Q323E/T348K/A390G/N452R/S453R/G459E |
| 501/502 | L15R/T28H/T66I/H81T/P90G/T91K/R95E/P113G/L145V/P147E/Q148N/G228R/D243M/ |
| | R257T/D272N/E291P/M296L/A319G/Q323E/T348K/A390G/N452R/S453R/G459E |
| 503/504 | L15R/T28H/H81T/P90G/T91K/R95E/P113G/S142Q/L145V/G228R/D243M/R257T/ |
| | D272N/R285Q/E291P/M296L/E317S/A319G/Q323E/T348K/A390G/N452R/S453R/G459E |
| 505/506 | L15R/T28H/S37A/M50S/T66I/R95E/P113G/E124A/L145V/P147E/Q148N/A205P/G228R/ |
| | D243M/R257T/D272N/R285Q/E291P/M296L/Q323E/T348K/A390G/N452R/S453R/ |
| | G459E |
| 507/508 | L15R/T66I/H81T/R95E/P113G/L145V/P147E/Q148N/G228R/D243M/R257T/D272N/ |
| | E291P/M296L/Q323E/T348K/A390G/N452R/S453R/G459E |
| 509/510 | T66I/T91K/R95E/P113G/E124A/S142Q/L145V/P147E/Q148N/G228R/D243M/R257T/ |
| | D272N/E291P/M296L/Q323E/T348K/A390G/N452R/S453R/G459E |
| 511/512 | L15R/S37A/T66I/H81T/R95E/P113G/L145V/P147E/Q148N/G228R/D243M/R257T/ |
| | D272N/E291P/M296L/E317S/A319G/Q323E/T348K/A390G/N452R/S453R/G459E |
| 513/514 | L15R/M50S/P90G/T91K/R95E/P113G/E124A/S142Q/L145V/P147E/G228R/D243M/ |
| | R257T/D272N/R285Q/E291P/M296L/E317S/A319G/Q323E/T348K/A390G/N452R/ |
| | S453R/G459E |
| 515/516 | L15R/M50S/P90G/T91K/R95E/P113G/S142Q/L145V/P147E/Q148N/D203E/A205P/ |
| | G228R/D243M/R257T/D272N/E291P/M296L/Q323E/T348K/A390G/N452R/S453R/G459E |
| 517/518 | L15R/T28H/H81T/R95E/P113G/S142Q/L145V/P147E/Q148N/G228R/D243M/R257T/ |
| | D272N/R285Q/E291P/M296L/E317S/A319G/Q323E/T348K/A390G/N452R/S453R/G459E |
| 519/520 | L15R/T28H/M50S/T66I/P90G/T91K/R95E/P113G/L145V/D203E/G228R/D243M/R257T/ |
| | D272N/R285Q/E291P/M296L/A319G/Q323E/T348K/A390G/N452R/S453R/G459E |
| 521/522 | L15R/T66I/P90G/T91K/R95E/P113G/L145V/P147E/Q148N/A205P/G228R/D243M/ |
| | R257T/D272N/R285Q/E291P/M296L/Q323E/T348K/A390G/N452R/S453R/G459E |
| 523/524 | L15R/T28H/P90G/T91K/R95E/P113G/S142Q/L145V/P147E/Q148N/G228R/D243M/ |
| | R257T/D272N/R285Q/E291P/M296L/E317S/A319G/Q323E/T348K/A390G/N452R/ |
| | S453R/G459E |
| 525/526 | L15R/S37A/T91K/R95E/P113G/L145V/Q148N/G228R/D243M/R257T/D272N/R285Q/ |
| | E291P/M296L/A319G/Q323E/T348K/A390G/N452R/S453R/G459E |
| 527/528 | H81T/R95E/P113G/L145V/P147E/Q148N/D203E/A205P/G228R/D243M/R257T/ |
| | D272N/E291P/M296L/Q323E/T348K/A390G/N452R/S453R/G459E |
| 529/530 | R95E/P113G/L145V/P147E/Q148N/G228R/D243M/R257T/D272N/R285Q/E291P/ |
| | M296L/A319G/Q323E/T348K/A390G/N452R/S453R/G459E |
| 531/532 | L15R/M50S/P90G/R95E/P113G/L145V/P147E/Q148N/G228R/D243M/R257T/D272N/ |
| | E291P/M296L/Q323E/T348K/A390G/N452R/S453R/G459E |
| 533/534 | L15R/T66I/H81T/P90G/R95E/P113G/L145V/G228R/D243M/R257T/D272N/R285Q/ |
| | E291P/M296L/A319G/Q323E/T348K/A390G/N452R/S453R/G459E |
| 535/536 | M50S/H81T/R95E/P113G/L145V/P147E/Q148N/G228R/D243M/R257T/D272N/R285Q/ |
| | E291P/M296L/Q323E/T348K/A390G/N452R/S453R/G459E |
| 537/538 | S37A/R95E/P113G/L145V/P147E/Q148N/G228R/D243M/R257T/D272N/R285Q/E291P/ |
| | M296L/Q323E/T348K/A390G/N452R/S453R/G459E |
| 539/540 | L15R/S37A/T66I/L84V/P90G/T91K/R95E/P113G/L145V/D203E/G228R/D243M/R257T/ |
| | D272N/R285Q/E291P/M296L/E317S/Q323E/T348K/A390G/N452R/S453R/G459E |
| 541/542 | L15R/L84I/P90G/T91K/R95E/P113G/L145V/D203E/G228R/D243M/R257T/D272N/ |
| | R285Q/E291P/M296L/Q323E/T348K/A390G/N452R/S453R/G459E |
| 543/544 | S37A/P90G/T91K/R95E/P113G/L145V/P147E/G228R/D243M/R257T/D272N/E291P/ |
| | M296L/Q323E/T348K/A390G/N452R/S453R/G459E |
| 545/546 | P90G/T91K/R95E/P113G/L145V/A205P/G228R/D243M/R257T/D272N/E291P/M296L/ |
| | E317S/A319G/Q323E/T348K/A390G/N452R/S453R/G459E |
| 547/548 | M50S/R95E/P113G/L145V/Q148N/D203E/G228R/D243M/R257T/D272N/E291P/ |
| | M296L/E317S/Q323E/T348K/A390G/N452R/S453R/G459E |
| 549/550 | L15R/T28H/M50S/T66I/H81T/L84I/P90G/R95E/P113G/L145V/G228R/D243M/R257T/ |
| | D272N/R285Q/E291P/M296L/E317S/Q323E/T348K/A390G/N452R/S453R/G459E |
| 551/552 | L15R/H81T/R95E/P113G/L145V/P147E/G228R/D243M/R257T/D272N/E291P/M296L/ |
| | Q323E/T348K/A390G/N452R/S453R/G459E |
| 553/554 | L15R/R95E/P113G/L145V/G228R/D243M/R257T/D272N/R285Q/E291P/M296L/ |
| | Q323E/T348K/A390G/N452R/S453R/G459E |
| 555/556 | S37A/M50S/Q60K/H81T/P90G/R95E/P113G/E124A/S142Q/L145V/P147E/Q148N/K176S/ |
| | D203E/A205P/G228L/D243M/R257T/D272N/R285Q/E291S/M296L/E317S/Q323E/ |
| | T348K/A390G/N452R/S453R/G459E |
| 557/558 | M50S/Q60K/S64R/H81T/P90G/R95E/P113G/E124A/L145V/P147E/Q148N/D203E/A205P/ |
| | G228R/D243M/R257T/D272N/R285Q/E291P/M296L/E317S/A319G/Q323E/S342A/ |
| | T348K/A390G/N452R/S453R/G459E |
| 559/560 | M50S/T66I/H81T/P90G/R95E/P113G/E124A/L145V/P147E/Q148N/D203E/A205P/ |
| | G228L/D243M/R257T/D272N/R285Q/E291P/M296L/A319G/Q323E/S342M/T348K/A390G/ |
| | A395L/N452R/S453R/G459E |
| 561/562 | S37A/M50S/H81T/P90G/R95E/P113G/E124A/S142Q/L145V/P147E/Q148N/D203E/ |
| | A205P/G228R/D243M/R257T/D272N/R285Q/E291S/M296L/E317S/Q323E/T348K/A390G/ |
| | N452R/S453R/G459E |
| 563/564 | M50S/S64R/H81T/P90G/R95E/T107D/P113G/E124A/S142Q/L145V/P147E/Q148N/ |
| | D203E/A205P/G228R/D243M/R257T/D272N/R285Q/E291S/M296L/A319G/Q323E/ |
| | S342A/T348K/A390G/A395L/N452R/S453R/G459E |
| 565/566 | S37A/M50S/Q60K/H81T/P90G/R95E/P113G/E124A/L145V/P147E/Q148N/D203E/A205P/ |
| | G228R/D243M/R257T/D272N/R285Q/E291P/M296L/E317S/A319G/Q323E/S342A/ |
| | T348K/A390G/A395L/N452R/S453R/G459E |
| 567/568 | S37A/M50S/Q60K/H81T/P90G/R95E/T107D/P113G/E124A/S142Q/L145V/P147E/Q148N/ |
| | K176S/D203E/A205P/G228R/D243M/R257T/D272N/R285Q/E291P/M296L/E317S/ |
| | A319G/Q323E/S342M/T348K/A390G/N452R/S453R/G459E |
| 569/570 | M50S/H81T/P90G/R95E/P113G/E124A/S142Q/L145V/P147E/Q148N/D203E/A205P/ |
| | G228R/D243M/R257T/D272N/R285Q/E291P/M296L/E317S/A319G/Q323E/S342M/ |
| | T348K/A390G/A395L/N452R/S453R/G459E |
| 571/572 | M50S/H81T/P90G/R95E/P113G/E124A/L145V/P147E/Q148N/K176S/D203E/A205P/ |
| | G228L/D243M/R257T/D272N/R285Q/E291P/M296L/A319G/Q323E/T348K/A390G/ |
| | A395L/N452R/S453R/G459E |
| 573/574 | M50S/H81T/P90G/R95E/P113G/E124A/L145V/P147E/Q148N/D203E/A205P/G228L/ |
| | D243M/R257T/D272N/R285Q/E291S/M296L/Q323E/S342M/T348K/A390G/A395L/ |
| | N452R/S453R/G459E |
| 575/576 | M50S/S64R/H81T/P90G/R95E/P113G/E124A/L145V/P147E/Q148N/D203E/A205P/ |
| | G228R/D243M/R257T/D272N/R285Q/E291P/M296L/Q323E/T348K/A390G/A395L/ |
| | N452R/S453R/G459E |
| 577/578 | M50S/S64R/H81T/P90G/R95E/T107D/P113G/E124A/S142Q/L145V/P147E/Q148N/ |
| | K176S/D203E/A205P/G228L/D243M/R257T/D272N/R285Q/E291P/M296L/A319G/ |
| | Q323E/S342M/T348K/A390G/A395L/N452R/S453R/G459E |
| 579/580 | M50S/H81T/P90G/R95E/P113G/E124A/L145V/P147E/Q148N/D203E/A205P/G228R/ |
| | D243M/R257T/D272N/R285Q/E291P/M296L/Q323E/T348K/A390G/A395E/N452R/ |
| | S453R/G459E |
| 581/582 | M50S/Q60K/S64R/H81T/P90G/R95E/T107D/P113G/E124A/S142Q/L145V/P147E/ |
| | Q148N/D203E/A205P/G228R/D243M/R257T/D272N/R285Q/E291S/M296L/A319G/Q323E/ |
| | S342M/T348K/A390G/N452R/S453R/G459E |
| 583/584 | S37A/M50S/T66I/H81T/P90G/R95E/T107D/P113G/E124A/L145V/P147E/Q148N/ |
| | D203E/A205P/G228R/D243M/R257T/D272N/R285Q/E291S/M296L/E317S/Q323E/T348K/ |
| | A390G/N452R/S453R/G459E |
| 585/586 | S37A/M50S/T66I/H81T/P90G/R95E/T107D/P113G/E124A/L145V/P147E/Q148N/D203E/ |
| | A205P/G228R/D243M/R257T/D272N/R285Q/E291P/M296L/E317S/Q323E/T348K/ |
| | A390G/A395L/N452R/S453R/G459E |
| 587/588 | S37A/M50S/H81T/P90G/R95E/P113G/E124A/L145V/P147E/Q148N/D203E/A205P/ |
| | G228L/D243M/R257T/D272N/R285Q/E291P/M296L/E317S/Q323E/T348K/A390G/A395L/ |
| | N452R/S453R/G459E |
| 589/590 | M50S/H81T/P90G/R95E/P113G/E124A/L145V/P147E/Q148N/D203E/A205P/G228R/ |
| | D243M/R257T/D272N/R285Q/E291P/M296L/Q323E/S342A/T348K/A390G/A395L/N452R/ |
| | S453R/G459E |
| 591/592 | M50S/T66I/H81T/P90G/R95E/P113G/E124A/S142Q/L145V/P147E/Q148N/D203E/ |
| | A205P/G228R/D243M/R257T/D272N/R285Q/E291P/M296L/A319G/Q323E/S342M/ |
| | T348K/A390G/A395L/N452R/S453R/G459E |
| 593/594 | M50S/T66I/H81T/P90G/R95E/P113G/E124A/S142Q/L145V/P147E/Q148N/D203E/ |
| | A205P/G228L/D243M/R257T/D272N/R285Q/E291P/M296L/Q323E/T348K/A390G/A395L/ |
| | N452R/S453R/G459E |
| 595/596 | M50S/H81T/P90G/R95E/P113G/E124A/L145V/P147E/Q148N/D203E/A205P/G228R/ |
| | D243M/R257T/D272N/R285Q/E291P/M296L/Q323E/T348K/C363M/A390G/N452R/ |
| | S453R/G459E |
| 597/598 | M50S/H81T/P90G/R95E/P113G/E124A/S142Q/L145V/P147E/Q148N/D203E/A205P/ |
| | G228R/D243M/R257T/D272N/R285Q/E291P/M296L/Q323E/T348K/A390G/A395L/ |
| | N452R/S453R/G459E |
| 599/600 | M50S/Q60K/S64R/H81T/P90G/R95E/P113G/E124A/L145V/P147E/Q148N/R177T/D203E/ |
| | A205P/G228R/D243M/R257T/D272N/R285Q/E291S/M296L/Q323E/T348K/A390G/ |
| | A395L/N452R/S453R/G459E |
| 601/602 | M50S/T66I/H81T/P90G/R95E/P113G/E124A/L145V/P147E/Q148N/D203E/A205P/ |
| | G228R/D243M/R257T/D272N/R285Q/E291P/M296L/A319G/Q323E/T348K/A390G/N452R/ |
| | S453R/G459E |
| 603/604 | M50S/S64R/H81T/P90G/R95E/T107D/P113G/E124A/L145V/P147E/Q148N/R177T/ |
| | D203E/A205P/G228L/D243M/R257T/D272N/R285Q/E291S/M296L/E317S/Q323E/T348K/ |
| | A390G/A395L/N452R/S453R/G459E |
| 605/606 | M50S/H81T/P90G/R95E/P113G/E124A/L145V/P147E/Q148N/D203E/A205P/G228R/ |
| | D243M/R257T/D272N/R285Q/E291P/M296L/Q323E/S342M/T348K/A390G/A395L/ |
| | N452R/S453R/G459E |
| 607/608 | M50S/S64R/H81T/P90G/R95E/P113G/E124A/S142Q/L145V/P147E/Q148N/R177T/ |
| | D203E/A205P/G228L/D243M/R257T/D272N/R285Q/E291P/M296L/E317S/Q323E/T348K/ |
| | A390G/N452R/S453R/G459E |
| 609/610 | S37C/M50S/H81T/P90G/R95E/P113G/E124A/L145V/P147E/Q148N/D203E/A205P/ |
| | G228R/D243M/R257T/D272N/R285Q/E291P/M296L/Q323E/T348K/A390G/N452R/ |
| | S453R/G459E |
| 611/612 | M50S/H81T/P90G/R95E/P113G/E124A/L145V/P147E/Q148N/D203E/A205P/G228R/ |
| | D243M/R257T/H260L/D272N/R285Q/E291P/M296L/Q323E/T348K/A390G/N452R/ |
| | S453R/G459E |
| 613/614 | M50S/Q60K/H81T/P90G/R95E/P113G/E124A/L145V/P147E/Q148N/D203E/A205P/ |
| | G228L/D243M/R257T/D272N/R285Q/E291P/M296L/E317S/Q323E/T348K/A390G/A395L/ |
| | N452R/S453R/G459E |
| 615/616 | M50S/Q60K/S64R/H81T/P90G/R95E/P113G/E124A/L145V/P147E/Q148N/K176S/D203E/ |
| | A205P/G228R/D243M/R257T/D272N/R285Q/E291P/M296L/E317S/Q323E/S342M/ |
| | T348K/A390G/N452R/S453R/G459E |
| 617/618 | M50S/H81T/P90G/R95E/P113G/E124A/L145V/P147E/Q148N/R177T/D203E/A205P/ |
| | G228L/D243M/R257T/D272N/R285Q/E291P/M296L/Q323E/S342M/T348K/A390G/ |
| | A395L/N452R/S453R/G459E |
| 619/620 | M50S/S64R/H81T/P90G/R95E/P113G/E124A/S142Q/L145V/P147E/Q148N/R177T/ |
| | D203E/A205P/G228R/D243M/R257T/D272N/R285Q/E291P/M296L/E317S/A319G/Q323E/ |
| | T348K/A390G/N452R/S453R/G459E |
| 621/622 | M50S/Q60K/S64R/H81T/P90G/R95E/T107D/P113G/E124A/L145V/P147E/Q148N/D203E/ |
| | A205P/G228R/D243M/R257T/D272N/R285Q/E291P/M296L/Q323E/S342M/T348K/ |
| | A390G/N452R/S453R/G459E |
| 623/624 | M50S/Q60K/H81T/P90G/R95E/T107D/P113G/E124A/S142Q/L145V/P147E/Q148N/ |
| | D203E/A205P/G228R/D243M/R257T/D272N/R285Q/E291S/M296L/E317S/Q323E/ |
| | S342M/T348K/A390G/A395L/N452R/S453R/G459E |
| 625/626 | M50S/T66I/H81T/P90G/R95E/P113G/E124A/L145V/P147E/Q148N/D203E/A205P/ |
| | G228L/D243M/R257T/D272N/R285Q/E291P/M296L/A319G/Q323E/T348K/A390G/ |
| | N452R/S453R/G459E |
| 627/628 | M50S/S64R/H81T/P90G/R95E/P113G/E124A/L145V/P147E/Q148N/D203E/A205P/ |
| | G228L/D243M/R257T/D272N/R285Q/E291P/M296L/E317S/A319G/Q323E/T348K/ |
| | A390G/N452R/S453R/G459E |
| 629/630 | M50S/H81T/P90G/R95E/P113G/E124A/L145V/P147E/Q148N/S168F/D203E/A205P/ |
| | G228R/D243M/R257T/D272N/R285Q/E291P/M296L/Q323E/T348K/A390G/N452R/ |
| | S453R/G459E |
| 631/632 | M50S/H81T/P90G/R95E/P113G/E124A/L145V/P147E/Q148N/D203E/A205P/G228R/ |
| | D243M/R257T/D272N/R285Q/E291P/M296L/A319G/Q323E/T348K/A390G/A395L/ |
| | N452R/S453R/G459E |
| 633/634 | S37A/M50S/H81T/P90G/R95E/T107D/P113G/E124A/L145V/P147E/Q148N/D203E/ |
| | A205P/G228L/D243M/R257T/D272N/R285Q/E291P/M296L/Q323E/T348K/A390G/ |
| | N452R/S453R/G459E |
| 635/636 | M50S/T66I/H81T/P90G/R95E/P113G/E124A/S142Q/L145V/P147E/Q148N/D203E/ |
| | A205P/G228R/D243M/R257T/D272N/R285Q/E291P/M296L/Q323E/T348K/A390G/N452R/ |
| | S453R/G459E |
| 637/638 | S37A/M50S/H81T/P90G/R95E/P113G/E124A/L145V/P147E/Q148N/D203E/A205P/ |
| | G228R/D243M/R257T/D272N/R285Q/E291P/M296L/Q323E/S342M/T348K/A390G/ |
| | N452R/S453R/G459E |
| 639/640 | M50S/Q60K/S64R/H81T/P90G/R95E/P113G/E124A/L145V/P147E/Q148N/K176S/D203E/ |
| | A205P/G228L/D243M/R257T/D272N/R285Q/E291P/M296L/Q323E/T348K/A390G/ |
| | A395L/N452R/S453R/G459E |
| 641/642 | M50S/Q60K/S64R/H81T/P90G/R95E/P113G/E124A/L145V/P147E/Q148N/D203E/A205P/ |
| | G228R/D243M/R257T/D272N/R285Q/E291P/M296L/Q323E/S342M/T348K/A390G/ |
| | N452R/S453R/G459E |
| 643/644 | Q35R/M50S/H81T/P90G/R95E/P113G/E124A/L145V/P147E/Q148N/D203E/A205P/ |
| | G228R/D243M/R257T/D272N/R285Q/E291P/M296L/Q323E/T348K/A390G/N452R/ |
| | S453R/G459E |
| 645/646 | M50S/Q60K/T66I/H81T/P90G/R95E/P113G/E124A/L145V/P147E/Q148N/D203E/A205P/ |
| | G228R/D243M/R257T/D272N/R285Q/E291P/M296L/Q323E/T348K/A390G/A395L/ |
| | N452R/S453R/G459E |
| 647/648 | M50S/H81T/P90G/R95E/P113G/E124A/L145V/P147E/Q148N/D203E/A205P/G228R/ |
| | D243M/R257T/D272N/R285Q/E291P/M296L/A319G/Q323E/T348K/A390G/N452R/ |
| | S453R/G459E |
| 649/650 | M50S/H81T/P90G/R95E/P113G/E124A/L145V/P147E/Q148N/D203E/A205P/G228R/ |
| | D243M/R257T/D272N/R285Q/E291S/M296L/E317S/A319G/Q323E/S342M/T348K/ |
| | A390G/A395L/N452R/S453R/G459E |
| 651/652 | S37A/M50S/H81T/P90G/R95E/P113G/E124A/L145V/P147E/Q148N/R177T/D203E/ |
| | A205P/G228R/D243M/R257T/D272N/R285Q/E291P/M296L/Q323E/T348K/A390G/ |
| | N452R/S453R/G459E |
| 653/654 | M50S/H81T/P90G/R95E/T107V/P113G/E124A/L145V/P147E/Q148N/D203E/A205P/ |
| | G228R/D243M/R257T/D272N/R285Q/E291P/M296L/Q323E/T348K/A390G/N452R/ |
| | S453R/G459E |
| 655/656 | S37A/M50S/H81T/P90G/R95E/P113G/E124A/L145V/P147E/Q148N/D203E/A205P/ |
| | G228R/D243M/R257T/D272N/R285Q/E291P/M296L/Q323E/T348K/A390G/N452R/ |
| | S453R/G459E |
| 657/658 | S37A/M50S/Q60K/S64R/H81T/P90G/R95E/P113G/E124A/S142Q/L145V/P147E/Q148N/ |
| | D203E/A205P/G228R/D243M/R257T/D272N/R285Q/E291S/M296L/Q323E/T348K/ |
| | A390G/N452R/S453R/G459E |
| 659/660 | S37A/M50S/Q60K/H81T/P90G/R95E/P113G/E124A/S142Q/L145V/P147E/Q148N/D203E/ |
| | A205P/G228L/D243M/R257T/D272N/R285Q/E291S/M296L/Q323E/T348K/A390G/ |
| | N452R/S453R/G459E |
| 661/662 | M50S/Q60K/H81T/P90G/R95E/P113G/E124A/L145V/P147E/Q148N/D203E/A205P/ |
| | G228R/D243M/R257T/D272N/R285Q/E291P/M296L/A319G/Q323E/S342A/T348K/ |
| | A390G/N452R/S453R/G459E |
| 663/664 | M50S/T66I/H81T/P90G/R95E/P113G/E124A/L145V/P147E/Q148N/K176S/D203E/ |
| | A205P/G228R/D243M/R257T/D272N/R285Q/E291P/M296L/E317S/A319G/Q323E/T348K/ |
| | A390G/A395L/N452R/S453R/G459E |
| 665/666 | S37A/M50S/H81T/P90G/R95E/P113G/E124A/L145V/P147E/Q148N/R177T/D203E/ |
| | A205P/G228L/D243M/R257T/D272N/R285Q/E291P/M296L/Q323E/T348K/A390G/ |
| | N452R/S453R/G459E |
| 667/668 | M50S/A78T/H81T/P90G/R95E/P113G/E124A/L145V/P147E/Q148N/D203E/A205P/ |
| | G228R/D243M/R257T/H260Y/D272N/R285Q/E291P/M296L/Q323E/T348K/A390G/ |
| | N452R/S453R/G459E |
| 669/670 | M50S/H81T/P90G/R95E/P113G/E124A/L145V/P147E/Q148N/D203E/A205P/G228R/ |
| | D243M/R257T/D272N/R285Q/E291P/M296L/Q323E/T348K/A390G/S396A/N452R/ |
| | S453R/G459E |
| 671/672 | M50S/H81T/P90G/R95E/P113G/E124A/L145V/P147E/Q148N/D203E/A205P/G228R/ |
| | D243M/R257T/D272N/R285Q/E291P/M296L/Q323E/T345S/T348K/A390G/N452R/ |
| | S453R/G459E |
| 673/674 | S37C/M50S/H81T/P90G/R95E/P113G/E124A/L145V/P147E/Q148N/D203E/A205P/ |
| | G228R/D243M/R257T/D272N/R285Q/E291P/M296L/Q323E/T348K/A390G/N452R/ |
| | S453R/G459E |
| 675/676 | M50S/H81T/P90G/R95E/P113G/E124A/L145V/P147E/Q148N/D203E/A205P/G228R/ |
| | D243M/R257T/D272N/R285Q/E291P/M296L/Q323E/S342H/T348K/A390G/N452R/ |
| | S453R/G459E |
| 677/678 | M50S/H81T/P90G/R95E/P113G/E124A/L145V/P147E/Q148N/D203E/A205P/G228R/ |
| | D243M/R257T/D272N/R285Q/E291P/M296L/Q323E/T348K/A390G/A395V/N452R/ |
| | S453R/G459E |
| 679/680 | M50S/H81T/P90G/R95E/P113G/E124A/L145V/P147E/Q148N/D203E/A205P/G228R/ |
| | D243M/R257T/D272N/R285Q/E291P/M296L/Q323E/T348K/Q367V/A390G/N452R/ |
| | S453R/G459E |
| 681/682 | M50S/H81T/P90G/R95E/P113G/E124A/L145V/P147E/Q148N/D203E/A205P/G228R/ |
| | D243M/R257T/D272N/R285Q/E291P/M296L/Q323E/T348K/A390G/A395L/N452R/ |
| | S453R/G459E |
| 683/684 | M50S/H81T/P90G/R95E/P113G/E124A/L145V/P147E/Q148N/D203E/A205P/G228R/ |
| | D243M/R257T/D272N/R285Q/E291P/M296L/Q323E/T348K/Q367L/A390G/N452R/ |
| | S453R/G459E |
| 685/686 | E38A/M50S/H81T/P90G/R95E/P113G/E124A/L145V/P147E/Q148N/D203E/A205P/ |
| | G228R/D243M/R257T/D272N/R285Q/E291P/M296L/Q323E/T348K/A390G/N452R/ |
| | S453R/G459E |
| 687/688 | M50S/H81T/P90G/R95E/T107V/P113G/E124A/L145V/P147E/Q148N/D203E/A205P/ |
| | G228R/D243M/R257T/D272N/R285Q/E291P/M296L/Q323E/T348K/A390G/N452R/ |
| | S453R/G459E |
| 689/690 | M50S/H81T/P90G/R95E/P113G/E124A/L145V/P147E/Q148N/D203E/A205P/G228K/ |
| | D243M/R257T/D272N/R285Q/E291P/M296L/Q323E/T348K/A390G/N452R/S453R/G459E |
| 691/692 | M50S/H81T/P90G/R95E/P113G/E124A/L145V/P147E/Q148N/D203E/A205P/G228R/ |
| | D243M/R257T/H260L/D272N/R285Q/E291P/M296L/Q323E/T348K/A390G/N452R/ |
| | S453R/G459E |
| 693/694 | M50S/S57V/H81T/P90G/R95E/P113G/E124A/L145V/P147E/Q148N/D203E/A205P/ |
| | G228R/D243M/R257T/D272N/R285Q/E291P/M296L/Q323E/T348K/A390G/N452R/ |
| | S453R/G459E |
| 695/696 | R51H/H81T/P90G/R95E/P113G/E124A/L145V/P147E/Q148N/D203E/A205P/G228R/ |
| | D243M/R257T/D272N/R285Q/E291P/M296L/Q323E/T348K/A390G/N452R/S453R/G459E |
| 697/698 | M50S/H81T/P90G/R95E/P113G/E124A/L145V/P147E/Q148N/D203E/A205P/G228R/ |
| | D243M/R257T/D272N/R285Q/E291P/M296L/Q323E/Q338V/T348K/A390G/N452R/ |
| | S453R/G459E |
| 699/700 | M50S/H81T/P90G/R95E/P113G/E124A/L145V/P147E/Q148N/D203E/A205P/G228R/ |
| | D243M/R257T/D272N/M296L/Q323E/T348K/G385A/A390G/N452R/S453R/G459E |
| 701/702 | M50S/H81T/P90G/R95E/P113G/E124A/L145V/P147E/Q148N/A175F/D203E/A205P/ |
| | G228R/D243M/R257T/D272N/R285Q/E291P/M296L/Q323E/T348K/A390G/N452R/ |
| | S453R/G459E |
| 703/704 | M50S/Q60K/H81T/P90G/R95E/P113G/E124A/L145V/P147E/Q148N/D203E/A205P/ |
| | G228R/D243M/R257T/D272N/R285Q/E291P/M296L/Q323E/T348K/A390G/N452R/ |
| | S453R/G459E |
| 705/706 | M50S/H81T/P90G/R95E/P113G/E124A/L145V/P147E/Q148N/D203E/A205P/G228Q/ |
| | D243M/R257T/D272N/R285Q/E291P/M296L/Q323E/T348K/A390G/N452R/S453R/G459E |
| 707/708 | M50S/H81T/P90G/R95E/P113G/E124A/L145S/D203E/A205P/G228R/D243M/R257T/ |
| | D272N/R285Q/E291P/M296L/Q323E/T348K/A390G/N452R/S453R/G459E |
| 709/710 | M50S/H81T/P90G/R95E/P113G/E124A/L145V/P147E/Q148N/D203E/A205P/G228R/ |
| | D243M/R257T/D272N/R285Q/E291P/M296L/Q323E/T348K/A390G/A395M/N452R/ |
| | S453R/G459E |
| 711/712 | M50S/Q60S/H81T/P90G/R95E/P113G/E124A/L145V/P147E/Q148N/D203E/A205P/ |
| | G228R/D243M/R257T/D272N/R285Q/E291P/M296L/Q323E/T348K/A390G/N452R/ |
| | S453R/G459E |
| 713/714 | M50S/H81T/P90G/R95E/P113G/E124A/L145V/P147E/Q148N/R177V/D203E/A205P/ |
| | G228R/D243M/R257T/D272N/R285Q/E291P/M296L/Q323E/T348K/A390G/N452R/ |
| | S453R/G459E |
| 715/716 | M50S/H81T/P90G/R95E/P113G/E124A/L145V/P147E/Q148N/D203E/A205P/G228R/ |
| | D243M/R257T/D272N/R285Q/E291P/M296L/Q323E/T348K/Q367A/A390G/N452R/ |
| | S453R/G459E |
| 717/718 | M50S/H81T/P90G/R95E/P113G/E124A/L145V/P147E/Q148N/D203E/A205P/G228R/ |
| | D243M/R257T/H260S/D272N/R285Q/E291P/M296L/Q323E/T348K/A390G/N452R/ |
| | S453R/G459E |
| 719/720 | T28A/M50S/H81T/P90G/R95E/P113G/E124A/L145V/P147E/Q148N/D203E/A205P/ |
| | G228R/D243M/R257T/D272N/R285Q/E291P/M296L/Q323E/T348K/A390G/N452R/ |
| | S453R/G459E |
| 721/722 | M50S/H81T/P90G/R95E/P113G/S118R/E124A/L145V/P147E/Q148N/D203E/A205P/ |
| | G228R/D243M/R257T/D272N/R285Q/E291P/M296L/Q323E/T348K/A390G/N452R/ |
| | S453R/G459E |
| 723/724 | M50S/S64V/H81T/P90G/R95E/P113G/E124A/L145V/P147E/Q148N/D203E/A205P/ |
| | G228R/D243M/R257T/D272N/R285Q/E291P/M296L/Q323E/T348K/A390G/N452R/ |
| | S453R/G459E |
| 725/726 | T28A/M50S/S64R/H81T/P90G/R95E/T107D/P113G/S118R/E124A/S142Q/L145V/ |
| | P147E/Q148N/A175F/K176S/D203E/A205P/G228L/D243M/R257T/H260S/D272N/R285Q/ |
| | E291P/M296L/A319G/Q323E/Q338V/S342M/T348K/Q367L/A390G/A395L/N452R/ |
| | S453R/G459E |
| 727/728 | M50S/S64R/H81T/P90G/R95E/T107D/P113G/S118R/E124A/S142Q/L145V/P147E/ |
| | Q148N/S168F/K176S/D203E/A205P/G228L/D243M/R257T/H260Y/D272N/R285Q/E291P/ |
| | M296L/A319G/Q323E/S342M/T348K/A390G/A395L/S396A/N452R/S453R/G459E |
| 729/730 | E38A/M50S/Q60S/S64R/H81T/P90G/R95E/T107D/P113G/E124A/S142Q/L145V/P147E/ |
| | Q148N/S168F/K176S/D203E/A205P/G228L/D243M/R257T/H260L/D272N/R285Q/ |
| | E291P/M296L/A319G/Q323E/Q338V/S342M/T348K/Q367L/A390G/A395L/N452R/ |
| | S453R/G459E |
| 731/732 | T28A/E38A/M50S/S57V/Q60S/S64R/H81T/P90G/R95E/T107D/P113G/E124A/S142Q/ |
| | L145V/P147E/Q148N/K176S/D203E/A205P/G228L/D243M/R257T/H260L/D272N/R285Q/ |
| | E291P/M296L/A319G/Q323E/S342M/T348K/C363M/Q367L/A390G/A395L/N452R/ |
| | S453R/G459E |
| 733/734 | M50S/S57V/S64R/H81T/P90G/R95E/T107D/P113G/S118R/E124A/S142Q/L145V/P147E/ |
| | Q148N/K176S/D203E/A205P/G228L/D243M/R257T/H260L/D272N/R285Q/E291P/ |
| | M296L/A319G/Q323E/Q338V/S342M/T348K/Q367L/A390G/A395L/N452R/S453R/G459E |
| 735/736 | M50S/S57V/S64R/H81T/P90G/R95E/T107D/P113G/S118R/E124A/S142Q/L145V/P147E/ |
| | Q148N/S168F/K176S/R177V/D203E/A205P/G228L/D243M/R257T/H260L/D272N/ |
| | R285Q/E291P/M296L/A319G/Q323E/Q338V/S342M/T348K/Q367L/A390G/A395L/ |
| | N452R/S453R/G459E |
| 737/738 | M50S/S64R/H81T/P90G/R95E/T107D/P113G/E124A/S142Q/L145V/P147E/Q148N/ |
| | K176S/D203E/A205P/G228L/D243M/R257T/H260Y/D272N/R285Q/E291P/M296L/ |
| | A319G/Q323E/S342M/T348K/A390G/A395L/S396A/N452R/S453R/G459E |
| 739/740 | T28A/M50S/S64R/H81T/P90G/R95E/T107D/P113G/S118R/E124A/S142Q/L145V/ |
| | P147E/Q148N/S168F/K176S/D203E/A205P/G228L/D243M/R257T/H260L/D272N/R285Q/ |
| | E291P/M296L/A319G/Q323E/S342M/T348K/Q367L/A390G/A395L/S396A/N452R/S453R/ |
| | G459E |
| 741/742 | T28A/M50S/S64R/H81T/P90G/R95E/T107D/P113G/E124A/S142Q/L145V/P147E/Q148N/ |
| | K176S/D203E/A205P/G228L/D243M/R257T/H260L/D272N/R285Q/E291P/M296L/ |
| | A319G/Q323E/Q338V/S342M/T348K/A390G/A395L/N452R/S453R/G459E |
| 743/744 | T28A/M50S/Q60K/S64R/H81T/P90G/R95E/T107D/P113G/E124A/S142Q/L145V/P147E/ |
| | Q148N/S168I/K176S/D203E/A205P/G228L/D243M/R257T/H260L/D272N/R285Q/ |
| | E291P/M296L/A319G/Q323E/S342M/T348K/A390G/A395L/N452R/S453R/G459E |
| 745/746 | M50S/S57V/Q60K/S64R/H81T/P90G/R95E/T107D/P113G/S118R/E124A/S142Q/L145V/ |
| | P147E/Q148N/A175F/K176S/R177V/D203E/A205P/G228L/D243M/R257T/H260L/ |
| | D272N/R285Q/E291P/M296L/A319G/Q323E/Q338V/S342M/T348K/A390G/A395L/ |
| | N452R/S453R/G459E |
| 747/748 | T28A/M50S/S57V/S64R/H81T/P90G/R95E/T107D/P113G/E124A/S142Q/L145V/P147E/ |
| | Q148N/K176S/D203E/A205P/G228L/D243M/R257T/H260Y/D272N/R285Q/E291P/ |
| | M296L/A319G/Q323E/Q338V/S342M/T348K/Q367L/A390G/A395L/N452R/S453R/G459E |
| 749/750 | Q35R/M50S/S64R/H81T/P90G/R95E/T107D/P113G/E124A/S142Q/L145V/P147E/Q148N/ |
| | K176S/D203E/A205P/G228L/D243M/R257T/H260S/D272N/R285Q/E291P/M296L/ |
| | A319G/Q323E/Q338V/S342M/T348K/Q367L/A390G/A395L/N452R/S453R/G459E |
| 751/752 | M50S/S64R/H81T/P90G/R95E/T107D/P113G/S118R/E124A/S142Q/L145V/P147E/ |
| | Q148N/A175F/K176S/D203E/A205P/G228L/D243M/R257T/H260L/D272N/R285Q/E291P/ |
| | M296L/A319G/Q323E/Q338V/S342M/T348K/A390G/A395L/N452R/S453R/G459E |
| 753/754 | M50S/S64R/H81T/P90G/R95E/T107D/P113G/E124A/S142Q/L145V/P147E/Q148N/ |
| | S168F/K176S/D203E/A205P/G228L/D243M/R257T/H260L/D272N/R285Q/E291P/M296L/ |
| | A319G/Q323E/S342M/T348K/A390G/A395L/N452R/S453R/G459E |
| 755/756 | M50S/S57V/Q60S/S64R/H81T/P90G/R95E/T107D/P113G/E124A/S142Q/L145V/P147E/ |
| | Q148N/S168F/K176S/R177V/D203E/A205P/G228L/D243M/R257T/H260S/D272N/ |
| | R285Q/E291P/M296L/A319G/Q323E/Q338V/S342M/T348K/Q367L/A390G/A395L/ |
| | N452R/S453R/G459E |
| 757/758 | T28A/M50S/S64R/H81T/P90G/R95E/T107D/P113G/E124A/S142Q/L145V/P147E/Q148N/ |
| | S168F/K176S/D203E/A205P/G228L/D243M/R257T/H260S/D272N/R285Q/E291P/ |
| | M296L/A319G/Q323E/Q338V/S342M/T348K/A390G/A395L/N452R/S453R/G459E |
| 759/760 | M50S/S64R/H81T/P90G/R95E/T107D/P113G/E124A/S142Q/L145V/P147E/Q148N/ |
| | K176S/D203E/A205P/G228L/D243M/R257T/H260Y/D272N/R285Q/E291P/M296L/ |
| | A319G/Q323E/S342M/T348K/Q367L/A390G/A395L/N452R/S453R/G459E |
| 761/762 | T28A/M50S/S57V/S64R/H81T/P90G/R95E/T107D/P113G/E124A/L137V/S142Q/L145V/ |
| | P147E/Q148N/K176S/D203E/A205P/G228L/D243M/R257T/H260L/D272N/R285Q/ |
| | E291P/M296L/A319G/Q323E/S342M/T348K/A390G/A395L/N452R/S453R/G459E |
| 763/764 | E38A/M50S/Q60K/S64R/H81T/P90G/R95E/T107D/P113G/E124A/S142Q/L145V/P147E/ |
| | Q148N/A175F/K176S/D203E/A205P/G228L/D243M/R257T/H260L/D272N/R285Q/ |
| | E291P/M296L/A319G/Q323E/Q338V/S342M/T348K/A390G/A395L/N452R/S453R/G459E |
| 765/766 | E38A/M50S/Q60K/S64R/H81T/P90G/R95E/T107D/P113G/E124A/S142Q/L145V/P147E/ |
| | Q148N/K176S/D203E/A205P/G228L/D243M/R257T/H260S/D272N/R285Q/E291P/ |
| | M296L/A319G/Q323E/S342M/T348K/Q367A/A390G/A395L/S396A/N452R/S453R/G459E |
| 767/768 | M50S/S57V/Q60K/S64R/H81T/P90G/R95E/T107D/P113G/E124A/S142Q/L145V/P147E/ |
| | Q148N/K176S/D203E/A205P/G228L/D243M/R257T/H260S/D272N/R285Q/E291P/ |
| | M296L/A319G/Q323E/S342M/T348K/C363M/Q367V/A390G/A395L/N452R/S453R/G459E |
| 769/770 | M50S/Q60K/S64R/H81T/P90G/R95E/T107D/P113G/E124A/S142Q/L145V/P147E/ |
| | Q148N/K176S/D203E/A205P/G228L/D243M/R257T/H260L/D272N/R285Q/E291P/M296L/ |
| | A319G/Q323E/S342M/T348K/Q367A/A390G/A395L/N452R/S453R/G459E |
| 771/772 | T28A/E38A/M50S/Q60K/S64R/H81T/P90G/R95E/T107D/P113G/E124A/S142Q/L145V/ |
| | P147E/Q148N/K176S/D203E/A205P/G228L/D243M/R257T/H260S/D272N/R285Q/E291P/ |
| | M296L/A319G/Q323E/S342M/T348K/Q367L/A390G/A395L/N452R/S453R/G459E |
| 773/774 | M50S/Q60S/S64R/H81T/P90G/R95E/T107D/P113G/E124A/S142Q/L145V/P147E/Q148N/ |
| | S168F/K176S/D203E/A205P/G228L/D243M/R257T/D272N/R285Q/E291P/M296L/ |
| | A319G/Q323E/S342M/T348K/A390G/A395L/N452R/S453R/G459E |
| 775/776 | M50S/S64R/H81T/P90G/R95E/T107D/P113G/E124A/S142Q/L145V/P147E/Q148N/ |
| | K176S/D203E/A205P/G228L/D243M/R257T/H260L/D272N/R285Q/E291P/M296L/A319G/ |
| | Q323E/S342M/T348K/C363M/Q367A/A390G/A395L/N452R/S453R/G459E |
| 777/778 | M50S/S64R/H81T/P90G/R95E/T107D/P113G/E124A/S142Q/L145V/P147E/Q148N/ |
| | K176S/R177V/D203E/A205P/G228L/D243M/R257T/H260Y/D272N/R285Q/E291P/M296L/ |
| | A319G/Q323E/S342M/T348K/C363M/Q367V/A390G/A395L/N452R/S453R/G459E |
| 779/780 | E38A/M50S/S64R/H81T/P90G/R95E/T107D/P113G/E124A/S142Q/L145V/P147E/Q148N/ |
| | K176S/D203E/A205P/G228L/D243M/R257T/H260L/D272N/R285Q/E291P/M296L/ |
| | A319G/Q323E/S342M/T348K/A390G/A395L/N452R/S453R/G459E |
| 781/782 | T28A/M50S/Q60K/S64R/H81T/P90G/R95E/T107D/P113G/S118R/E124A/S142Q/L145V/ |
| | P147E/Q148N/K176S/R177V/D203E/A205P/G228L/D243M/R257T/H260Y/D272N/ |
| | R285Q/E291P/M296L/A319G/Q323E/S342M/T348K/A390G/A395L/N452R/S453R/G459E |
| 783/784 | T28A/Q35R/M50S/Q60S/S64R/H81T/P90G/R95E/T107D/P113G/S118R/E124A/S142Q/ |
| | L145V/P147E/Q148N/A175F/K176S/D203E/A205P/G228L/D243M/R257T/H260Y/D272N/ |
| | R285Q/E291P/M296L/A319G/Q323E/S342M/T348K/A390G/A395L/N452R/S453R/G459E |
| 785/786 | M50S/Q60S/S64R/H81T/P90G/R95E/T107D/P113G/E124A/S142Q/L145V/P147E/Q148N/ |
| | K176S/D203E/A205P/G228L/D243M/R257T/D272N/R285Q/E291P/M296L/A319G/ |
| | Q323E/S342M/T348K/Q367L/A390G/A395L/N452R/S453R/G459E |
| 787/788 | T28A/M50S/Q60S/S64R/H81T/P90G/R95E/T107D/P113G/S118R/E124A/S142Q/L145V/ |
| | P147E/Q148N/K176S/D203E/A205P/G228L/D243M/R257T/D272N/R285Q/E291P/ |
| | M296L/A319G/Q323E/S342M/T348K/A390G/A395L/N452R/S453R/G459E |
| 789/790 | M50S/S57V/S64R/H81T/P90G/R95E/T107D/P113G/S118R/E124A/S142Q/L145V/P147E/ |
| | Q148N/K176S/D203E/A205P/G228L/D243M/R257T/D272N/R285Q/E291P/M296L/ |
| | A319G/Q323E/S342M/T348K/A390G/A395L/N452R/S453R/G459E |
| 791/792 | M50S/S64R/H81T/P90G/R95E/T107D/P113G/S118R/E124A/S142Q/L145V/P147E/ |
| | Q148N/K176S/D203E/A205P/G228L/D243M/R257T/H260L/D272N/R285Q/E291P/M296L/ |
| | A319G/Q323E/Q338V/S342M/T348K/A390G/A395L/S396A/N452R/S453R/G459E |
| 793/794 | T28A/E38A/M50S/S57V/Q60K/S64R/H81T/P90G/R95E/T107D/P113G/S118R/E124A/ |
| | S142Q/L145V/P147E/Q148N/K176S/R177V/D203E/A205P/G228L/D243M/R257T/H260Y/ |
| | D272N/R285Q/E291P/M296L/A319G/Q323E/Q338V/S342M/T348K/C363M/Q367L/ |
| | A390G/A395L/S396A/N452R/S453R/G459E |
| 795/796 | T28A/E38A/M50S/Q60S/S64R/H81T/P90G/R95E/T107D/P113G/E124A/S142Q/L145V/ |
| | P147E/Q148N/K176S/D203E/A205P/G228L/D243M/R257T/H260L/D272N/R285Q/E291P/ |
| | M296L/A319G/Q323E/S342M/T348K/C363M/Q367L/A390G/A395L/N452R/S453R/G459E |
| 797/798 | T28A/Q35R/E38A/M50S/S57V/S64R/H81T/P90G/R95E/T107D/P113G/S118R/E124A/ |
| | S142Q/L145V/P147E/Q148N/K176S/D203E/A205P/G228L/D243M/R257T/H260L/D272N/ |
| | R285Q/E291P/M296L/A319G/Q323E/S342M/T348K/C363M/Q367L/A390G/A395L/ |
| | N452R/S453R/G459E |
| 799/800 | T28A/M50S/S57V/Q60S/S64R/H81T/P90G/R95E/T107D/P113G/E124A/S142Q/L145V/ |
| | P147E/Q148N/S168F/K176S/D203E/A205P/G228L/D243M/R257T/H260L/D272N/ |
| | R285Q/E291P/M296L/A319G/Q323E/S342M/T348K/Q367A/A390G/A395L/N452R/S453R/ |
| | G459E |
| 801/802 | M50S/S64R/H81T/P90G/R95E/T107D/P113G/E124A/S142Q/L145V/P147E/Q148N/ |
| | S168F/A175F/K176S/D203E/A205P/G228L/D243M/R257T/H260L/D272N/R285Q/E291P/ |
| | M296L/A319G/Q323E/Q338V/S342M/T348K/Q367L/A390G/A395L/N452R/S453R/G459E |
| 803/804 | M50S/S57V/Q60S/S64R/H81T/P90G/R95E/T107D/P113G/E124A/S142Q/L145V/P147E/ |
| | Q148N/S168F/K176S/D203E/A205P/G228L/D243M/R257T/H260Y/D272N/R285Q/E291P/ |
| | M296L/A319G/Q323E/Q338V/S342M/T348K/C363M/Q367V/A390G/A395L/S396A/ |
| | N452R/S453R/G459E |
| 805/806 | M50S/Q60S/S64R/H81T/P90G/R95E/T107D/P113G/E124A/S142Q/L145V/P147E/Q148N/ |
| | S168F/K176S/D203E/A205P/G228L/D243M/R257T/D272N/R285Q/E291P/M296L/A319G/ |
| | Q323E/S342M/T348K/C363M/Q367L/A390G/A395L/S396A/N452R/S453R/G459E |
| 807/808 | T28A/E38A/M50S/S57V/Q60K/S64R/H81T/P90G/R95E/T107D/P113G/S118R/E124A/ |
| | S142Q/L145V/P147E/Q148N/S168F/K176S/D203E/A205P/G228L/D243M/R257T/H260L/ |
| | D272N/R285Q/E291P/M296L/A319G/Q323E/S342M/T348K/Q367L/A390G/A395L/ |
| | N452R/S453R/G459E |
| 809/810 | T28A/M50S/S64R/H81T/P90G/R95E/T107D/P113G/E124A/S142Q/L145V/P147E/Q148N/ |
| | A175F/K176S/D203E/A205P/G228L/D243M/R257T/H260L/D272N/R285Q/E291P/M296L/ |
| | A319G/Q323E/S342M/T348K/Q367L/A390G/A395L/N452R/S453R/G459E |
| 811/812 | M50S/Q60S/S64R/H81T/P90G/R95E/T107D/P113G/E124A/S142Q/L145V/P147E/Q148N/ |
| | K176S/D203E/A205P/G228L/D243M/R257T/D272N/R285Q/E291P/M296L/A319G/ |
| | Q323E/S342M/T348K/C363M/Q367L/A390G/A395L/S396A/N452R/S453R/G459E |
| 813/814 | M50S/S64R/H81T/P90G/R95E/T107D/P113G/E124A/S142Q/L145V/P147E/Q148N/ |
| | K176S/D203E/A205P/G228L/D243M/R257T/H260S/D272N/R285Q/E291P/M296L/A319G/ |
| | Q323E/Q338V/S342M/T348K/Q367L/A390G/A395L/N452R/S453R/G459E |
| 815/816 | T28A/M50S/S57V/S64R/H81T/P90G/R95E/T107D/P113G/E124A/S142Q/L145V/P147E/ |
| | Q148N/K176S/D203E/A205P/G228L/D243M/R257T/H260Y/D272N/R285Q/E291P/ |
| | M296L/A319G/Q323E/Q338V/S342M/T348K/C363M/Q367L/A390G/A395L/N452R/ |
| | S453R/G459E |
| 817/818 | M50S/S64R/H81T/P90G/R95E/T107D/P113G/E124A/S142Q/L145V/P147E/Q148N/ |
| | S168F/K176S/D203E/A205P/G228L/D243M/R257T/H260L/D272N/R285Q/E291P/M296L/ |
| | A319G/Q323E/S342M/T348K/Q367L/A390G/A395L/N452R/S453R/G459E |
| 819/820 | M50S/S64R/H81T/P90G/R95E/T107D/P113G/E124A/S142Q/L145V/P147E/Q148N/ |
| | K176S/D203E/A205P/G228L/D243M/R257T/D272N/R285Q/E291P/M296L/A319G/ |
| | Q323E/S342M/T348K/Q367L/A390G/A395L/S396A/N452R/S453R/G459E |
| 821/822 | T28A/Q35R/M50S/S64R/H81T/P90G/R95E/T107D/P113G/E124A/S142Q/L145V/P147E/ |
| | Q148N/A175F/K176S/D203E/A205P/G228L/D243M/R257T/H260Y/D272N/R285Q/E291P/ |
| | M296L/A319G/Q323E/S342M/T348K/Q367L/A390G/A395L/S396A/N452R/S453R/G459E |
| 823/824 | M50S/S57V/Q60K/S64R/H81T/P90G/R95E/T107D/P113G/E124A/S142Q/L145V/P147E/ |
| | Q148N/S168F/K176S/D203E/A205P/G228L/D243M/R257T/H260L/D272N/R285Q/ |
| | E291P/M296L/A319G/Q323E/S342M/T348K/Q367L/A390G/A395L/N452R/S453R/G459E |

The application's sequence listing, which the Patent Office published only in electronic form, follows.

SEQUENCE LISTING (824 sequences)

SEQ ID NO: 1 - DNA, 1404 bp, synthetic construct
  misc_feature 1..1404: note = Variant of RNase inhibitor
  source 1..1404: mol_type = other DNA
atgcaccatcatcatcatcatggcggtagcggcaccatgtctctggatattcagtgtcagcaattgtcagatgcgcgttggacggaactgttaccgcttctgcaacagagcgaagtggtgcgcctggatgactgcggcctcactgagatgcgctgcaaagacatcagtagtgcactgcaagccaacccatcgttgaccgaattaagcctgtgtacaaatgagctgggtgatgctggagttcatttagtcctgcagggcttgcagtctcctacctgcaagattcgtaaactgtccctccagaactgttgtctgacgaagactggttgcggtgtattaccggacatgcttcgttcaatgcccaccctgcgcgaactgtatctgaatgataacccgttgggcgatgcgggcctccagctgctttgctccgggctgttagacccgcaatgtcacctggagaaactgcaggtcgaatactgcaatctcacagcagcctcgtgcgaaagcttggcgagcgctctgcgtgccaaacgccattttaaagaattagcggtttcgaacaacgaactgggtgaagcaggcgtgcgcgtactttgtcgtgggctggtggatagtgcgtgccaactggaggttctgaaactggaaaattgtggattgacctctgcctcctgcgaggatctttgtggtgtggtcgctagcaaaccaagcctccaggaattggaccttggcgataacaaattaggtgaccaaggcatcgcaacgttatgcccgcgcctgcttcacccttcatgccagattcgtgttttgtggctctgggattgtgatatcaccaccgccggctgccgcgacctctgtcgtgtattacgcgcgaaggaatccctcaaagagatgagtcttgcgggtaatgccttgggagatgaaggcgcacgtctcttgtgcgaatcgttattagaaccggcgtgccagctccagagcctttgggtgaaaagctgttctttcactgctgcttcatgccagcattttagttcgatgttgacgcgcaacacgtgtcttgtcgagctccaattgagcaataataaattaggtgattgtggcgtgcagcagctttgccaagggttatctcaaccaggtgccgccctccaggttttgtggttgggcgactgtgatgtagcacatagtggctgtgcaagcttagcttccgtgttgcttgtcaaccgttccttacgcgaactcgaccttagtaacaactgcatgggcgaagaagggattctccgtttgatggagagcgttgaacaaccgggatgcgtgcttgaacagttggtcctctatgacatctactggtcggaggagatggataattctttacgtgccttagaaggtcgcaaaccgtcattgcgcgtgattttc

SEQ ID NO: 2 - protein, 468 aa, synthetic construct
  REGION 1..468: note = Variant of RNase inhibitor
MHHHHHHGGSGTMSLDIQCQQLSDARWTELLPLLQQSEVVRLDDCGLTEMRCKDISSALQANPSLTELSLCTNELGDAGVHLVLQGLQSPTCKIRKLSLQNCCLTKTGCGVLPDMLRSMPTLRELYLNDNPLGDAGLQLLCSGLLDPQCHLEKLQVEYCNLTAASCESLASALRAKRHFKELAVSNNELGEAGVRVLCRGLVDSACQLEVLKLENCGLTSASCEDLCGVVASKPSLQELDLGDNKLGDQGIATLCPRLLHPSCQIRVLWLWDCDITTAGCRDLCRVLRAKESLKEMSLAGNALGDEGARLLCESLLEPACQLQSLWVKSCSFTAASCQHFSSMLTRNTCLVELQLSNNKLGDCGVQQLCQGLSQPGAALQVLWLGDCDVAHSGCASLASVLLVNRSLRELDLSNNCMGEEGILRLMESVEQPGCVLEQLVLYDIYWSEEMDNSLRALEGRKPSLRVIF

SEQ ID NO: 3 - DNA, 1401 bp, synthetic construct
  misc_feature 1..1401: note = Variant of RNase inhibitor
  source 1..1401: mol_type = other DNA
atgcaccatcatcatcatcatggcggtagcggcatgaatctggatattcagtgtcaacaattaagcgatgcgcgttggaccgaactgctgccgttgatccgccagtatgaagtggtgcgtcttgacgactgcggcttaacggaggttcgctgcaaagatatttctagtgcacttcaggcaaacccatcgctgactgaactgtccctgtgtaccaacgagcttggtgatgctggagtccatctggtattgcagggcctgcagtcaccgacatgcaagatccagaaattgagcctccaaaattgttgtctgaccaaaactggttgcggcgttttacctgacgtgctgcgcagtatgccgacgctgcgtgaactgcagctcagcgataaccccctggaagatgcgggtttgcaacttctttgcaaagggctgttagacccgctgtgtcacctggagaaactgcgcctcgaatactgcaatttgaccgcagcctcttgcgaagcgttagcgtcggccctgcgtgcaaagcgccattttcgtgaattggctgtctccaacaacgaggtaggcgaagcgggtgtgcgcgttctgtgtcgtgggctggtcgattcagcctgccagctggaagctctcaaactggagaattgtggccttaccagcgcatcgtgcgaagatctgtgtggtgttgttgcgagcaaaccatccttacaagaattagacttgggcgataacaaactgggagaccagggtattgccacgttatgcccgagtttattacacccttcttgtcagatccgcgtgctttggttgtgggattgcgacattacaacagcgggctgccgtgatctttgtcgcgtacttggcgccaaggaaagcctcaaagagatgtcactcgcagggaatgcgttgggtgatgaaggcgctcgtctcttgtgcgattctcttcgcgaaccgggttgtcaattacagtccctctgggtcaaaagctgcagtttcaccgcggcgagctgccatcattttggaatgatgttgacgcagaacaaacaccttgtcgagttgcagctctccaacaataagttaggtgactcaggcctccaagagctttgtcagggcttaggtcaaccagggaccacccttcaggtgttgtgtttgggcgattgcgatgtggcaaatggaggatgcgcatcgttagctagccttctcttagctaaccgtagtttgcgcgaacttgatctctcgaataattgtatggacgaccagggcatcctccaattaatggcgagcgtggaacaaccgggttgcacgttggaacagttggttctctatgacatttactggtctgaggagactgaaaactcgcttcgtgcgttagaaggtcgtaaacctggcttgcgcatcatctcc

SEQ ID NO: 4 - protein, 467 aa, synthetic construct
  REGION 1..467: note = Variant of RNase inhibitor
MHHHHHHGGSGMNLDIQCQQLSDARWTELLPLIRQYEVVRLDDCGLTEVRCKDISSALQANPSLTELSLCTNELGDAGVHLVLQGLQSPTCKIQKLSLQNCCLTKTGCGVLPDVLRSMPTLRELQLSDNPLEDAGLQLLCKGLLDPLCHLEKLRLEYCNLTAASCEALASALRAKRHFRELAVSNNEVGEAGVRVLCRGLVDSACQLEALKLENCGLTSASCEDLCGVVASKPSLQELDLGDNKLGDQGIATLCPSLLHPSCQIRVLWLWDCDITTAGCRDLCRVLGAKESLKEMSLAGNALGDEGARLLCDSLREPGCQLQSLWVKSCSFTAASCHHFGMMLTQNKHLVELQLSNNKLGDSGLQELCQGLGQPGTTLQVLCLGDCDVANGGCASLASLLLANRSLRELDLSNNCMDDQGILQLMASVEQPGCTLEQLVLYDIYWSEETENSLRALEGRKPGLRIIS

SEQ ID NO: 5 - DNA, 1401 bp, synthetic construct
  misc_feature 1..1401: note = Variant of RNase inhibitor
  source 1..1401: mol_type = other DNA
atgcaccatcatcatcatcatggcggtagcggcatgagtctggatattcgttgtgaacagttatcagatgcgcgctggaccgagctgttgccgctgatccaacaacatcaagttgtgcgccttgaagactgcggcctcacggaaggtcgttgcaaagatattggatctgccttacgtgcaaacagcgctctggcggagcttagcctgcgcacaaatgcattaggcgacgccggtgtctgtttggtattgcaggggttacagtcgccaacctgcaaagtgcagtccctctcgcttcagaactgtggcctcactgaaaccggttgccgtgttttggcgagcgtgcttcgttgtacgccgactttacgcgaattgcacctctccgataatcctttaggtgatccgggacttcgcctcttgagtgaaggccttttagacccgcagtcttgcttggagaaacttgaactcgaatcatgcaacttatcggctgctagctgtgaacccttggccgccatgctccgtgcgaagccgaactttaaagagcttgtcgtcagcaataattgcatccaggaagcaggcattcgcatgttatgtggtggtctcaaagagtctacctgcctcttggaaaccttgcgcttggataactgtggcgtgacgtccgcgaactgcaaggacctttgcgatgttgttgcggcgaaaccttccctccaagagttagatttaggcggcaatcgtcttggtgacgcaggaatcgccgcattgtgtccgggccttctccatacaagttgtcgcttgcgtaaactctggctttgggaatgcgatattaccgcggaaggttgccgtgatttaggccaggtattacgcgccaaacagagcttgaaagctctctcactcatgttgaacgagttaggtgacgaaggcgctcgtctcttatgtgaagcgcttcaagaaccaagttgccagcttgagtgtttatgggtacgcgtgtgcagcttcacggccacctgttgtccacactttcgcgcacttttggcgcagaataagttcttgacggagttacaactcggagaaaaccgtcttggtgatgcaggcgtgcaggaattatgccaaggtttgtctcaaccgggctcggttcttcgtgtgttaggtatcggcgactgcgatctcagcgataattgctgctcaaacttggccagcgtcttattagcgtcgtgttcattgcgcgaattggacctctccaataacggtcttggagatcctggagttcttcgcctcgtggaaagtttacgtcagccgggctgcgtccttgagtgtcttctcctctttgacgtgtatttgagcgatggcgtaaatgatcagttgcaggcgttggaagaagagaaaccgaccctccgcattatttcc

SEQ ID NO: 6 - protein, 467 aa, synthetic construct
  REGION 1..467: note = Variant of RNase inhibitor
MHHHHHHGGSGMSLDIRCEQLSDARWTELLPLIQQHQVVRLEDCGLTEGRCKDIGSALRANSALAELSLRTNALGDAGVCLVLQGLQSPTCKVQSLSLQNCGLTETGCRVLASVLRCTPTLRELHLSDNPLGDPGLRLLSEGLLDPQSCLEKLELESCNLSAASCEPLAAMLRAKPNFKELVVSNNCIQEAGIRMLCGGLKESTCLLETLRLDNCGVTSANCKDLCDVVAAKPSLQELDLGGNRLGDAGIAALCPGLLHTSCRLRKLWLWECDITAEGCRDLGQVLRAKQSLKALSLMLNELGDEGARLLCEALQEPSCQLECLWVRVCSFTATCCPHFRALLAQNKFLTELQLGENRLGDAGVQELCQGLSQPGSVLRVLGIGDCDLSDNCCSNLASVLLASCSLRELDLSNNGLGDPGVLRLVESLRQPGCVLECLLLFDVYLSDGVNDQLQALEEEKPTLRIIS

SEQ ID NO: 7 - DNA, 1416 bp, synthetic construct
  misc_feature 1..1416: note = Variant of RNase inhibitor
  source 1..1416: mol_type = other DNA
atgcaccatcatcatcatcatggcggtagcggcatggcggcagccgcatctctggatattcagtgcgaagaattaagcgacgctcgttggaccgagctgttgccgcttatccgccaaagtgaagtggtgcgtctggatgattgtggcttaactgaaggtcgctgccgtgacatgtcgcgcgcgctgcgtgccaacgcgtccctgacggagctctcactgcgcgccaatgagctcggcgatccaggagttcatttggtactgcaggctttgcagacaccgacctgtcgcattcgtaaactgagcctgcaaaactgcgcgcttaccgaagcaggttgtggcgttttacctggtgccctttgcgcagtgccgacgctgcgcgaactgcacctgaatgacaaccccttaggcgatgctgggctgcgtctcctgtgtgaaggtttacgtgctccacagtgccatctggaacgcttgcagctggagtattgtggcttgactgcagccggatgcggtgccttggcagcagtcctccgcgataaaccggatgtcaaggaacttgtactctcgaataatgaattaggcgacgctgggatgcgtgagcttgttcgcagtcttgccgctggtccgtccgccctcgaaaccttgaaattagatagctgcggattaggccctgaagcctgttctgaattgtcaggtcttctcagcgcaaaaccctccttgcgtgagctcgacttagggagtaacgctcttggtgatgcaggtgtggccgccttatgcccggggcttttgtctccgggatcgcgcttacgtaccctttggctctgggaatgtggtctcggagctgaagggtgccgtgagttgtgtcgtgtcttgggtgccaaagaaacgttacgcgaactcagtttagcagggaacgaggagcttggtgatgctggttgcgggctcttgtgcgaaacattgttaggtggtggatgccaacttgaaaccctttgggtgaagtcctgtggattaacggcagcaagctgtcctgcttgggcctcggttttaactcgcacccagaaactccaggagctccaattgtctgggaatcgtttaggtgacacaggagtgcgcgaactttgtgaagccttaggtcagccaggtgctacgttgcgcgtattgtggttaggtgattgcgaagtcaccgactctgggtgcgaaagcttagcaagccttctccgtgatacccgtagcttgcgcgaactcgacctctcaaacaacggattaggtgatgctggagtgttgcttttgttagggtgtcttgaacgtccggagtgtccactcgaacagctcgtgttgtacgacatctattggacggaagccgttgagcaacaacttcaggcccttgaacagcgtcgtccgagcctcaagattgtctac

SEQ ID NO: 8 - protein, 472 aa, synthetic construct
  REGION 1..472: note = Variant of RNase inhibitor
MHHHHHHGGSGMAAAASLDIQCEELSDARWTELLPLIRQSEVVRLDDCGLTEGRCRDMSRALRANASLTELSLRANELGDPGVHLVLQALQTPTCRIRKLSLQNCALTEAGCGVLPGALCAVPTLRELHLNDNPLGDAGLRLLCEGLRAPQCHLERLQLEYCGLTAAGCGALAAVLRDKPDVKELVLSNNELGDAGMRELVRSLAAGPSALETLKLDSCGLGPEACSELSGLLSAKPSLRELDLGSNALGDAGVAALCPGLLSPGSRLRTLWLWECGLGAEGCRELCRVLGAKETLRELSLAGNEELGDAGCGLLCETLLGGGCQLETLWVKSCGLTAASCPAWASVLTRTQKLQELQLSGNRLGDTGVRELCEALGQPGATLRVLWLGDCEVTDSGCESLASLLRDTRSLRELDLSNNGLGDAGVLLLLGCLERPECPLEQLVLYDIYWTEAVEQQLQALEQRRPSLKIVY

SEQ ID NO: 9 - DNA, 1401 bp, synthetic construct
  misc_feature 1..1401: note = Variant of RNase inhibitor
  source 1..1401: mol_type = other DNA
atgcaccatcatcatcatcatggcggtagcggcatgagtctggatattcagtgtgaacaattatctgatgcgcgttggaccgagttgctgccgctgatccagcagtatgaagttgtgcgccttgatgactgcggcctcacggaagtccgctgcaaagacatttcaagcgcagtgcaagccaacccagctctgactgaactgtcgttgcgtaccaatgagcttggtgatggaggcgtaggtctggttttacaggggctgcaaaacccgacgtgtaagatccagaaactgtccctgcagaattgcggcttaacagaagcgggctgtggtattttgcctggtatgctgcgtagccttagtaccctgcgcgaactgcatctcaacgataatccgatgggagacgccggcctgaaactcttatgcgaggggctgcaagatccgcagtgtcgcctggagaaattgcagctggaatactgcaacttgaccgcaactagctgcgaaccattagcgtcggtgctgcgtgtcaaagcggactttaaggaactggtactgtccaataatgatcttcacgaacctggtgttcgcatcctctgtcaaggcctgaaagattctgcctgccagttagagagcctgaaactcgaaaactgtggtattacggctgctaactgcaaagacctgtgtgatgtggtggcatcaaaggcgtcgttgcaggaacttgacctgagcagcaacaaattaggcaatgccggaatcgcggcgttatgcccgggcttgttactgcccagttgcaaactgcgtaccctttggttgtgggagtgcgatattacagccgaagggtgtaaagatttgtgtcgtgtcctgcgcgcaaagcagtccctcaaagaactttctctcgcgtcaaacgagctcaaagatgaaggtgcacgcttgttgtgcgaaagcttattagaaccgggctgccaactcgaatctctttggatcaagacctgtagtttaactgccgcttcgtgcccctatttctgtagcgtgcttacgaaatcgcgttcccttttggagcttcagatgagttcaaatccgttaggtgacgaaggcgttcaagaactctgtaaagcgctcagccagccagacaccgtattacgcgaattgtggcttggtgattgcgatgtcacgaactccgggtgcagctcattggccaatgtgcttttggcaaaccgttccttacgtgagctcgatctctcgaacaattgtatgggtggtccgggcgttctccagttgcttgagagcctcaaacaacctagttgcaccttacagcagcttgtgttgtacgacatctattggacaaacgaagtcgaagagcaattacgcgcgcttgaggaagaacgcccgtctctccgcattatttcg

SEQ ID NO: 10 - protein, 467 aa, synthetic construct
  REGION 1..467: note = Variant of RNase inhibitor
MHHHHHHGGSGMSLDIQCEQLSDARWTELLPLIQQYEVVRLDDCGLTEVRCKDISSAVQANPALTELSLRTNELGDGGVGLVLQGLQNPTCKIQKLSLQNCGLTEAGCGILPGMLRSLSTLRELHLNDNPMGDAGLKLLCEGLQDPQCRLEKLQLEYCNLTATSCEPLASVLRVKADFKELVLSNNDLHEPGVRILCQGLKDSACQLESLKLENCGITAANCKDLCDVVASKASLQELDLSSNKLGNAGIAALCPGLLLPSCKLRTLWLWECDITAEGCKDLCRVLRAKQSLKELSLASNELKDEGARLLCESLLEPGCQLESLWIKTCSLTAASCPYFCSVLTKSRSLLELQMSSNPLGDEGVQELCKALSQPDTVLRELWLGDCDVTNSGCSSLANVLLANRSLRELDLSNNCMGGPGVLQLLESLKQPSCTLQQLVLYDIYWTNEVEEQLRALEEERPSLRIIS

SEQ ID NO: 11 - DNA, 1416 bp, synthetic construct
  misc_feature 1..1416: note = Variant of RNase inhibitor
  source 1..1416: mol_type = other DNA
atgcaccatcatcatcatcatggcggtagcggcccgagtagcgttaccatgaatctggatattcagtgcgaacatctttccgacacgcagtggaaagagctgctgccacgtatccaacaagtggaagtcattcgcctcgatgattgtggcttaacagaagcgcgctgcaaagacatctcttctgctttacaggcaaacccgtcgctgactgagctgagcctgcacaactcagaattaggtgatgctggagtatgtcaggtgctccaggcgttacaaggtcctgcatgcaagatttgtaaattgagcctgcagaattgcagtcttaccgccgcctgttgtaccgttttgccgggcacgcttcgttggctccccaccttgctcgaacttcgcttatcagacaacccgcttggcgatgaggggttgcagctcttatgcgaaggtttgcgtgatccacaatgccatttagaacgcgtgcagcttgagtattgcaatttaactgctgcgtcctgtgaacctttagcagcggttcttccggcgaaattggggcttcgtgaactcgtcttgtcgaacaacgacttaggcgaagctggtgtgcaagtactttgccgcggcttgttgggtgccacgtgtccgttggagaccctcaaattagcgtcttgtggcgtgacagccgccaattgcaaggatttgtgcagtatcgtcgcgaccaaagatagcttacaggaacttgacctcggagaaagcaaattaggcgatgcaggtatggcggcattgtgtccaggtctcttatccccgtcgagcaaacttaagaccttgtggctttgggagtgcgacatttcgtcagaagggtgccgtgaaatcagccaggttcttcgcgccaaagagtcgctcaaagaacttagtttgatgggcaacgaattaggcgatcaaggtgctcgtctcttgtgtgaagcgttacgcgaacctgggtgtcgtttagagtctctctgggtgaaagcatgcggctttactgatgcttgctgcccggacttcagcaccatgcttgcgcagaacaaattcctcttggaactccagctcagcaataataagttgggagatacaggtgtccagcagttatgtcaaggcttatcccaacccggtgcaacgcttcagatgttgtgtttaggcgattgcgacgtaacggattctggatgtactgcattggcttcactccttttgagttcccgtagtttacgcgagcttgacctcagcaacaactgcatgggtgatgcgggcgtgcttcagcttgttgaatcgttgcgtcaaccgggatgcgctttacagcagctcgtgttgtacgatacctatttatcagaagcggttgacgactctcttcaagcgttggaggagagcaaaccatcgctccgcattatttcc

SEQ ID NO: 12 - protein, 472 aa, synthetic construct
  REGION 1..472: note = Variant of RNase inhibitor
MHHHHHHGGSGPSSVTMNLDIQCEHLSDTQWKELLPRIQQVEVIRLDDCGLTEARCKDISSALQANPSLTELSLHNSELGDAGVCQVLQALQGPACKICKLSLQNCSLTAACCTVLPGTLRWLPTLLELRLSDNPLGDEGLQLLCEGLRDPQCHLERVQLEYCNLTAASCEPLAAVLPAKLGLRELVLSNNDLGEAGVQVLCRGLLGATCPLETLKLASCGVTAANCKDLCSIVATKDSLQELDLGESKLGDAGMAALCPGLLSPSSKLKTLWLWECDISSEGCREISQVLRAKESLKELSLMGNELGDQGARLLCEALREPGCRLESLWVKACGFTDACCPDFSTMLAQNKFLLELQLSNNKLGDTGVQQLCQGLSQPGATLQMLCLGDCDVTDSGCTALASLLLSSRSLRELDLSNNCMGDAGVLQLVESLRQPGCALQQLVLYDTYLSEAVDDSLQALEESKPSLRIIS

SEQ ID NO: 13 - DNA, 1401 bp, synthetic construct
  misc_feature 1..1401: note = Variant of RNase inhibitor
  source 1..1401: mol_type = other DNA
atgcaccatcatcatcatcatggcggtagcggcatgagtctggatattcattttgaacagctttctgatgcgcgttggaccgagttgttgccgctcatccaacaacaccaagtggtgcgcctgattgactgcggcatcacggaaggtcgctgtaaagacattagcagcgcactgggagataacccaactctgaccgaactgaatctgtgcaacaacgagttaggtgatgctggcatgcgtttattattgcagggcctccattcaccgacgtgtaagatccagaaattgtcggttcagaattgcggtcttacagaagccgggtgtggcgtcttacctggtgcgctccgctcggtaccgaccctccgtgaactttatctctccaataatccacttggcgatgccgggttacgcttgttgtgcgacgggcttttagatccgcagtgccacattgaacgtttgcaggttgagtactgtaacttaactgcagcaagctgcgaacctcttgctgcggtgcttcgtgccaaacgcgagttcaaagaattgatggtctccaacaacgatctcggtgacgcgggagtgcgtgcgttatgtcgcggtctcgccgatagtgcatcgcccctcgaatctttacgcttggaaggctgcaatcttaccttggcgagctgtcaggacctcggtagtatcgtagcttcaaaagccagcctttgcacccttgagcttggcgataataaattaggcgacgcgggcattgccaagctttgtccgggcttgttatctccgtccagccaattgcgtacgttgtggttgtgggaatgcgatatcacagcgtcaggttgtcgcgacttatgccgtgtgctcaaagcaaaaggtagccttaaggaattaagtgttgcgggaaacgctgtcggcgatgaaggtgcccagttgctctgcgagtcgttattagctccctcctgccatcttgaatctctctgggccaaaagctgtgggtttacggcagcgtgttgtcaacatttctcagcaatgttagcgcgtaacacccgccttttggaattgcagctcagtggcaattctcttggagatgcgggtgttcagcagttatgccaaggtctcggacaaccaggcgcagtgttacgtgtcctttgcttgggcgattgtgaggtaaccaacaacggttgctcatcgttggcctccctcctccttgcgaatcacagcctctgcgagttggacctcagcaacaactgtatgagtgatgtgggtgtgttacagttagccgaatcgttacagcagcctggctgcatgcttgagaaattggtgctctttgacacgtattggatggaagataccgataatcgtttacgcgcccttgaagaatccaaaccgtcgctcaagattatttcc

SEQ ID NO: 14 - protein, 467 aa, synthetic construct
  REGION 1..467: note = Variant of RNase inhibitor
MHHHHHHGGSGMSLDIHFEQLSDARWTELLPLIQQHQVVRLIDCGITEGRCKDISSALGDNPTLTELNLCNNELGDAGMRLLLQGLHSPTCKIQKLSVQNCGLTEAGCGVLPGALRSVPTLRELYLSNNPLGDAGLRLLCDGLLDPQCHIERLQVEYCNLTAASCEPLAAVLRAKREFKELMVSNNDLGDAGVRALCRGLADSASPLESLRLEGCNLTLASCQDLGSIVASKASLCTLELGDNKLGDAGIAKLCPGLLSPSSQLRTLWLWECDITASGCRDLCRVLKAKGSLKELSVAGNAVGDEGAQLLCESLLAPSCHLESLWAKSCGFTAACCQHFSAMLARNTRLLELQLSGNSLGDAGVQQLCQGLGQPGAVLRVLCLGDCEVTNNGCSSLASLLLANHSLCELDLSNNCMSDVGVLQLAESLQQPGCMLEKLVLFDTYWMEDTDNRLRALEESKPSLKIIS

SEQ ID NO: 15 - DNA, 1401 bp, synthetic construct
  misc_feature 1..1401: note = Variant of RNase inhibitor
  source 1..1401: mol_type = other DNA
atgcaccatcatcatcatcatggcggtagcggcatgagtctggatatgcattatgaacagttaagcgatacccgttggacggagttgttaccgcgcatgcaacaatgccaggtgattcgtctggttgactgtggcatcactgaaggtcgctgccaggatgtctcttcagcgctgcgtgacaacccaaccctgacagaactcaatctgtgttccaacgaacttggagatgcaggcacgcacctggtattgcagggtcttcaaagccctacctgcaaagtgcagaaattatcgctgcagtcgtgttgtctgacagaagccagtggtcgcgctctggcgagcaccttgcgtgccattccctctcttcgcgagctggacctgtcctacaatccgttaggcgatgcagggctgcagttgttgtgcgaaggcctgcttgatcctcagtgccatatcgagtcactggaactgcaatattgcagtctttctgcggcgagctgtcaaccgttagcagccgttttacgtgctcgcccagaactgaaggagctggtgctgaacagcaatgactttggtgaagctggcacgcgcaccttgtgccaggcgctggtcgattcggcctgtcttctggaatccctgaaattggagtcatgtgggctgacctcagcaaactgccaggatttatgcggagtacttgctgcgaaagcgagcttacgtgacctggaactgggtgataatcgcctgggcgacgtgggtgttgccgccttgtgtccgggcctgttgagccctgggtgccagctgaagaccctgtggctttgggaatgcgatattacggcaggcggctgtcgtgatttatgccgcgtgctgcgtgcgaaagagtccctgcgcgagttctctatcgcaggtaacgcggtcggtgacgaaggagttcgtcttctgtgtgaatcgttattggaaccgtgctgtcgcctggaatcactgtgggtgaaaagctgcagtttaactgcggcctgttgtccgcacatttcggctatgctggcccaaaaccgttccctgcaggaacttcaactgagcaacaataaattggaggatgcaggcgtcggtgaattatgccgcgggcttggccagccaggagtacccctgcgtaccttgtggctgggtgattgcgaagtgacggacaaaggctgctctaatctggccagcctgttattagcgagtcgctctctgcaggagctggatctgtcgaacaactgtatgtccgaagttggtatcttggaattggcggaaagcgctcaacaaccgtcatgcgtgcttgagaagctgattctgtacgacatctattggaccgaagaaacagaggatcgtttgcaggcacttgcggaacgcaaacctagcctgaagattatttgc

SEQ ID NO: 16 - protein, 467 aa, synthetic construct
  REGION 1..467: note = Variant of RNase inhibitor
MHHHHHHGGSGMSLDMHYEQLSDTRWTELLPRMQQCQVIRLVDCGITEGRCQDVSSALRDNPTLTELNLCSNELGDAGTHLVLQGLQSPTCKVQKLSLQSCCLTEASGRALASTLRAIPSLRELDLSYNPLGDAGLQLLCEGLLDPQCHIESLELQYCSLSAASCQPLAAVLRARPELKELVLNSNDFGEAGTRTLCQALVDSACLLESLKLESCGLTSANCQDLCGVLAAKASLRDLELGDNRLGDVGVAALCPGLLSPGCQLKTLWLWECDITAGGCRDLCRVLRAKESLREFSIAGNAVGDEGVRLLCESLLEPCCRLESLWVKSCSLTAACCPHISAMLAQNRSLQELQLSNNKLEDAGVGELCRGLGQPGVPLRTLWLGDCEVTDKGCSNLASLLLASRSLQELDLSNNCMSEVGILELAESAQQPSCVLEKLILYDIYWTEETEDRLQALAERKPSLKIIC

SEQ ID NO: 17 - DNA, 1413 bp, synthetic construct
  misc_feature 1..1413: note = Variant of RNase inhibitor
  source 1..1413: mol_type = other DNA
atgcaccatcatcatcatcatggcggtagcggcatgagcgttgatacccagtgtctggacattcaatgcgaagaattatctggtcgttgggcgaaattgttgccgcttctgcagcagtgccatactgtgcgcctggatgattgtagtttaaccgaagcccactgtgagggcatctcatcggcactgcaagccaacccagtcctgacggagctgaatcttcgttccaacgggttaggtgacgctggcgtgcatcgcattctgcaggcgctgcagagtagcagctgcaagatccagaaactgtcctttgaatgctgcaaactgacggtagatggatgtcgcgttttgtctggctcgcttcgttcactgccgacactgcaagaattgaatctgacctgcaacgcgttaaaagacgcaggtctgcagcttctttgtgaaggcctgttagatccgcaatgtcacgtggagaaattgcagctggaattctgccgcttatccagcgcctcgtgcgaaccgctggctagcgtcttacgtgcgaaaccggactttaaggagctgaccgttgggaacaatgatttcgatgaagcaggtattcgcgtgttgtgtcaaggcctgaaagaatcgccctgccagctggagactctgaaacttgaacgttgtggtgtaacgagtgataattgccgcgacctgtgctctatcttggcgagcaaagcctccttacgtgaactggcgctgggccataacaacctgggagatatgggcattgctgagttatgtccagggttgttacacccgtcatcacgcctgcgtaccctttggatctgggaatgcggtctgacagcaaagagctgtgaagatctgggtcgcgtcttgcgtgccaaagacagtctgaaagaattatctttggcgggcaataaactgggcgatgagggtgcccaggtgctgtgcgaaagcctgctggaacctggatgccagcttgagtcgctgtgggtgaagtattgtggtttaaccgcggcgtgttgctcccattttagtagtgttctggctcaaaacaaattccttctggaactgcagattagcgaaaatcgcttaggcgatgcaggcgtacaagagttgtgccaggggttaggtcaaccgggctctgtcatgcgttcactgtggctgggcgaatgtgacgttacggatgtgggttgtctttctttggccaagaccctgctggcaaacgactcgctgcgcgaactggatttgtccaataattgcatgggagacgagggtatccagatgcttctggaatccttacgtcagccgagttgccatctggaacagttggtgctgtacgacatctattggtcgctggagatggatcgccaacttcaggcgctggagaaagagaaatcttctctgcgcattatttcg

SEQ ID NO: 18 - protein, 471 aa, synthetic construct
  REGION 1..471: note = Variant of RNase inhibitor
MHHHHHHGGSGMSVDTQCLDIQCEELSGRWAKLLPLLQQCHTVRLDDCSLTEAHCEGISSALQANPVLTELNLRSNGLGDAGVHRILQALQSSSCKIQKLSFECCKLTVDGCRVLSGSLRSLPTLQELNLTCNALKDAGLQLLCEGLLDPQCHVEKLQLEFCRLSSASCEPLASVLRAKPDFKELTVGNNDFDEAGIRVLCQGLKESPCQLETLKLERCGVTSDNCRDLCSILASKASLRELALGHNNLGDMGIAELCPGLLHPSSRLRTLWIWECGLTAKSCEDLGRVLRAKDSLKELSLAGNKLGDEGAQVLCESLLEPGCQLESLWVKYCGLTAACCSHFSSVLAQNKFLLELQISENRLGDAGVQELCQGLGQPGSVMRSLWLGECDVTDVGCLSLAKTLLANDSLRELDLSNNCMGDEGIQMLLESLRQPSCHLEQLVLYDIYWSLEMDRQLQALEKEKSSLRIIS

SEQ ID NO: 19 - DNA, 1401 bp, synthetic construct
  misc_feature 1..1401: note = Variant of RNase inhibitor
  source 1..1401: mol_type = other DNA
atgcaccatcatcatcatcatggcggtagcggcatgaatctggatattcagtgtgaatgcttaagcgacacccagtggaaagagttgttgccgcaaatgcaacaggtggaagttatccgcctggatgattgtggcctgacggaagtccgttgcgaggacatttcctccgcgctgcaagccaacccatcgctcactgaacttagtctgcataactctggtttaggagatgcaggccttcgccgcctcctgcaggctttgcagggtcctgcgcgtaagatccgtaaattaagcctccagaattgcagcttgacagcagcaggctgtaccgcccttccgggtgcgttacgttcattgccgtcgttacttgaactccacttgagtgacaacacccttgatgaagccggcctccgcctcctttgcgaggggttacgcgatccgcagtgccatttggaacgtgtacacctcgaatattgtcgcttaactgcggctggttgtgaaccacttgcaacggccttacgtgctcgtcctggattgcgcggcttagtgctcagcaataatgatttgggtgaagacggcgttcgtgcgttatgcggcggtcttttgggtgcgcgttgcccgcttgagaccttacgcctcgcgtcttgtggtgtgacggctgccaactgcaaagatttgtgttctttagtcgccgccaaagactcccttcaagaattagatcttggcgagaacaaattgggagatgcaggcgtagcaaccttatgccccggacttctctcaccgagctcgcgcctcaagacattgtggctctgggaatgcgacattagtgctgaaggctgtcgtgagatcagccgcgtgttgcatgccaaagaaagcctcaaagagcttagtttagcaggtaacgaattaggcgatcagggtgcacgtctcttgtgcaaagctcttcgcgaaccaggctgtcgcttggaatcactctgggttaagacctgcggcttaactcacgcctgttgtcccgacttttcggctatgttggcccagaataaaagcttgcttgagcttcaactctccaacaaccgccttggtgatacgggagtccagcagttatgccagggtttaggccaaccgggtgcaaccctccaaatgttgtgcttaggcgattgtgaagtgaccgactcaggctgtacggcattggccagcctccttcttagttcgcgttctttgcgtgaactcgacctctcgaataattgcatgggtgatccgggcgtgttacagttagttgaatctttgcgtcagcctggttgtgctcttcgccagctcctcttgtacgacatctatctttctgaagccgtcgataaccatctcaaagcccttgaggattccaaaccaagcctccgcattatttcg

SEQ ID NO: 20 - protein, 467 aa, synthetic construct
  REGION 1..467: note = Variant of RNase inhibitor
MHHHHHHGGSGMNLDIQCECLSDTQWKELLPQMQQVEVIRLDDCGLTEVRCEDISSALQANPSLTELSLHNSGLGDAGLRRLLQALQGPARKIRKLSLQNCSLTAAGCTALPGALRSLPSLLELHLSDNTLDEAGLRLLCEGLRDPQCHLERVHLEYCRLTAAGCEPLATALRARPGLRGLVLSNNDLGEDGVRALCGGLLGARCPLETLRLASCGVTAANCKDLCSLVAAKDSLQELDLGENKLGDAGVATLCPGLLSPSSRLKTLWLWECDISAEGCREISRVLHAKESLKELSLAGNELGDQGARLLCKALREPGCRLESLWVKTCGLTHACCPDFSAMLAQNKSLLELQLSNNRLGDTGVQQLCQGLGQPGATLQMLCLGDCEVTDSGCTALASLLLSSRSLRELDLSNNCMGDPGVLQLVESLRQPGCALRQLLLYDIYLSEAVDNHLKALEDSKPSLRIIS

SEQ ID NO: 21 - DNA, 1401 bp, synthetic construct
  misc_feature 1..1401: note = Variant of RNase inhibitor
  source 1..1401: mol_type = other DNA
atgcaccatcatcatcatcatggcggtagcggcatgtctctgtcaattcagtgtcaacaattaagcgatgcgcgttggaccgaattgctgccgctgatccagcagtatgaagtcgtgcgcttagacgattgcggcctgactgaggttcgctgcaaagacatttccagtgcattgcaagccaacccaagcctgacggaactttcgctgtgcaccaatgaacttggtgatgctggagtacatctggtgttacagggcctgcagtcaccgacgtgtaagatccagaaactgagcttgcagaactgttgtctgaccaagacaggttgcggcgttttgcctgcggtgctgcgtagtatgccgaccctgcgcgaactgcacctttccgataatccattagaggacgccgggctgcaacttctttgcgagggtctgttagatccgcagtgccatctggagaaattgcagctggaatactgtaacttgactgcagcatcgtgcgaaagcttagcgtctgctctgcgtaacaaacagcactttaaagaattagccgtctcgaataatgaaattggcgaagccggtgtacgcgtgctgtgtcaagggctggttgagagtgcgtgccaactggaaacgctgaaactggaaaactgtggcttaacccccgcgagctgcgaggatttgcgtgcagtggtcgcgtccaagacatctctgcgcgaacttgacctgggagataacaaattgggtgatcagggtatcgctgttctgtgtccgtcacttctgcatcctagctgccagattcgtgtgctgtggctgtgggaatgcgacgttaccgccacgggctgtcgcgatttatgccacgtcgtctcgaccaaagaaagtttggaggagctgtctctggcgtgtaatgctcttggcgatgaaggcgcccaactgctgtgcgaaagcttgttagaaccggggtcccgtctgcagagcctgtgggtgaaatcgtgcaacttcactgcagcgtgctgccatcattttggtaccatgttaccacgccgtccggcattgctgcgcgtatcttggcctagtggccgtgttgcggctgctccggcgggagaattacgcgcccgtcttgcgtcaggtggtgcagcatgtcgcgtgagcttcttaggagactgtgatgtggcgaatgatggctgtgcgagtctggctagcctgctgctggcaaaccgttcacttcgcgagttggacctgtccaataatcgtatgaacgatcaaggtatccgccgcctgatggaatccgtagaacagccggggtgtgcgcttgagcagctggtcctgtatgacatttactggtcgcaggatatcgaagattctttgcgtgcgctggaagaacgtaaacccagcctgaagattattagc

SEQ ID NO: 22 - protein, 467 aa, synthetic construct
  REGION 1..467: note = Variant of RNase inhibitor
MHHHHHHGGSGMSLSIQCQQLSDARWTELLPLIQQYEVVRLDDCGLTEVRCKDISSALQANPSLTELSLCTNELGDAGVHLVLQGLQSPTCKIQKLSLQNCCLTKTGCGVLPAVLRSMPTLRELHLSDNPLEDAGLQLLCEGLLDPQCHLEKLQLEYCNLTAASCESLASALRNKQHFKELAVSNNEIGEAGVRVLCQGLVESACQLETLKLENCGLTPASCEDLRAVVASKTSLRELDLGDNKLGDQGIAVLCPSLLHPSCQIRVLWLWECDVTATGCRDLCHVVSTKESLEELSLACNALGDEGAQLLCESLLEPGSRLQSLWVKSCNFTAACCHHFGTMLPRRPALLRVSWPSGRVAAAPAGELRARLASGGAACRVSFLGDCDVANDGCASLASLLLANRSLRELDLSNNRMNDQGIRRLMESVEQPGCALEQLVLYDIYWSQDIEDSLRALEERKPSLKIIS

SEQ ID NO: 23 - DNA, 1401 bp, synthetic construct
  misc_feature 1..1401: note = Variant of RNase inhibitor
  source 1..1401: mol_type = other DNA
atgcaccatcatcatcatcatggcggtagcggcatggacccagatattcagtgcgaagaactgaccggtagccgttggacggagttggtgtcctccatgaagaacagcaaatcgatccgcctggacgactgttcattatctcgctcgcattgcgaagatctgtgttcagttctgagcaccaatcaaagcctcaaagagcttaaactgtccaacaacgaactgaaagatgatggcgtcgaagtgttgtgcaaagggcttctcacaccatcttgtaatctggagttattatggctgcagaattgcagtttgactggagcgtgttgtgaaagtctgcgttcggtactgagcaagaaaccgtctcttaccgaattgcacttaggcgacaacaaactcgaaacagcaggtggtaaggttctctgcaaaggccttcttgattcaaactgcaagattcgcaatttgacccttagctattgcgaactcacgaaagacaatgccgagttattaactagcgtgttgtgtgctaaacctacgctcaaagaactcaacttgagtaacaacgagttaggcgatgcggcgatcaaacagttatgccgtgggcttatggattccaattgcaaccttgaactcttgcatttggagaattgtggtgtcaccgccgaaagttgtgcagacctctcgaatgtattgcgcaccaaaccgagcctcattgacttagctgtgggcgataacaagtttggtgatgcaggcttagccctcttgtgccaaggcttattgcaccccaactgcaaagttcagaagttatggctttgggaatgcgatttaacggcggcgtcgtgtaaagacctttccaatttgatccgtaccaaagaatcgctcattgagatgagcctcatcactaactcattaggtgatgctggaatggatcttctttgtcagggccttaaagacccgaaatgcaagctccaaagtctttggttgcgcgaatgtggattaacgagtgcctgctgcgaaagcattcgttccgtcttgagcaccaatatgagcttgaaagaacttcagatcgggtcaaacaagctcgaagatgagggtgtcaaactcatttgtgaaggtttacgccagccatcctgcaatattgagagtatctggttaggcgactcagatgcgacagcaggctgttgtgatagcattgcggcggtgatctcgaccaaacaatgcttgcgtgaaatcgacctttcgaacaacatgttggaagatgcaggtgttcgcaaactctacgaggctgtgaaatccccgaattgcaagttgaagcatttggtactttatgacatttactggagcagtgaagtggatgatgagcttcaggcgctcgaagaatcaaaaccggggctcaagattatttcg

SEQ ID NO: 24 - protein, 467 aa, synthetic construct
  REGION 1..467: note = Variant of RNase inhibitor
MHHHHHHGGSGMDPDIQCEELTGSRWTELVSSMKNSKSIRLDDCSLSRSHCEDLCSVLSTNQSLKELKLSNNELKDDGVEVLCKGLLTPSCNLELLWLQNCSLTGACCESLRSVLSKKPSLTELHLGDNKLETAGGKVLCKGLLDSNCKIRNLTLSYCELTKDNAELLTSVLCAKPTLKELNLSNNELGDAAIKQLCRGLMDSNCNLELLHLENCGVTAESCADLSNVLRTKPSLIDLAVGDNKFGDAGLALLCQGLLHPNCKVQKLWLWECDLTAASCKDLSNLIRTKESLIEMSLITNSLGDAGMDLLCQGLKDPKCKLQSLWLRECGLTSACCESIRSVLSTNMSLKELQIGSNKLEDEGVKLICEGLRQPSCNIESIWLGDSDATAGCCDSIAAVISTKQCLREIDLSNNMLEDAGVRKLYEAVKSPNCKLKHLVLYDIYWSSEVDDELQALEESKPGLKIIS

SEQ ID NO: 25 - DNA, 1404 bp, synthetic construct
  misc_feature 1..1404: note = Variant of RNase inhibitor
  source 1..1404: mol_type = other DNA
atgcaccatcatcatcatcatggcggtagcggcaccatgtctctggatattcagtgtcagcaattgtcagatgcgcgttggacggaactgttaccgcttctgcaacagagcgaagtggtgcgcctggatgactgcggcctcactgagatgcgctgcaaagacatcagtagtgcactgcaagccaacccatcgttgaccgaattaagcctgtgtacaaatgagctgggtgatgctggagttcatttagtcctgcagggcttgcagtctcctacctgcaagattcgcaaactgtccctccagaactgttgtctgacgaagactggttgcggtgtattaccggacatgcttcgttcaatgcccaccctgcgcgaactgtatctgaatgataacccgttgggcgatgcgggcctccagctgctttgctccgggctgttagacccgcaatgtcacctggagaaactgcaggtcgaatactgcaatctcacagcagcctcgtgcgaaagcttggcgagcgctctgcgtgccaaacgccattttaaagaattagcggtttcgaacaacgaactgggtgaagcaggcgtgcgcgtactttgtcgtgggctggtggatagtgcgtgccaactggaggttctgaaactggaaaattgtggattgacctctgcctcctgcgaggatctttgtggtgtggtcgctagcaaaccaagcctccaggaattggaccttggcgataacaaattaggtgaccaaggcatcgcaacgttatgcccgtttctgcttcacccttcatgccagattcgtgttttgtggctctgggattgtgatatcaccaccgccggctgccgcgacctctgtcgtgtattacgcgcgaaggaatccctcaaagagatgagtcttgcgggtaatgccttgggagatgaaggcgcacgtctcttgtgcgaatcgttattagaaccggcgtgccagctccagagcctttgggtgaaaagctgttctttcactgctgcttcatgccagcattttagttcgatgttgacgcgcaacacgtgtcttgtcgagctccaattgagcaataataaattaggtgattgtggcgtgcagcagctttgccaagggttatctcaaccaggtgccgccctccaggttttgtggttgggcgactgtgatgtagcacatagtggctgtgcaagcttagcttccgtgttgcttgtcaaccgttccttacgcgaactcgaccttagtaacaactgcatgggcgaagaagggattctccgtttgatggagagcgttgaacaaccgggatgcgtgcttgaacagttggtcctctatgacatctactggtcggaggagatggataattctttacgtgccttagaagagcgcaaaccgtcattgcgcgtgattttc

SEQ ID NO: 26 - protein, 468 aa, synthetic construct
  REGION 1..468: note = Variant of RNase inhibitor
MHHHHHHGGSGTMSLDIQCQQLSDARWTELLPLLQQSEVVRLDDCGLTEMRCKDISSALQANPSLTELSLCTNELGDAGVHLVLQGLQSPTCKIRKLSLQNCCLTKTGCGVLPDMLRSMPTLRELYLNDNPLGDAGLQLLCSGLLDPQCHLEKLQVEYCNLTAASCESLASALRAKRHFKELAVSNNELGEAGVRVLCRGLVDSACQLEVLKLENCGLTSASCEDLCGVVASKPSLQELDLGDNKLGDQGIATLCPFLLHPSCQIRVLWLWDCDITTAGCRDLCRVLRAKESLKEMSLAGNALGDEGARLLCESLLEPACQLQSLWVKSCSFTAASCQHFSSMLTRNTCLVELQLSNNKLGDCGVQQLCQGLSQPGAALQVLWLGDCDVAHSGCASLASVLLVNRSLRELDLSNNCMGEEGILRLMESVEQPGCVLEQLVLYDIYWSEEMDNSLRALEERKPSLRVIF

SEQ ID NO: 27 - DNA, 1404 bp, synthetic construct
  misc_feature 1..1404: note = Variant of RNase inhibitor
  source 1..1404: mol_type = other DNA
atgcaccatcatcatcatcatggcggtagcggcaccatgtctctggatattcagtgtcagcaattgtcagatgcgcgttggacggaactgttaccgcttctgcaacagagcgaagtggtgcgcctggatgactgcggcctcactgagatgcgctgcaaagacatcagtagtgcactgcaagccaacccatcgttgaccgaattaagcctgtgtacaaatgagctgggtgatgctggagttcatttagtcctgcagggcttgcagtctcctacctgcaagattcgtaaactgtccctccagaactgttgtctgacgaagactggttgcggtgtattaccggacatgcttcgttcaatgcccaccctgcgcgaactgtatctgaatgataacccgttgggcgatgcgggcctccagctgctttgctccgggctgttagacccgcaatgtcacctggagaaactgcaggtcgaatactgcaatctcacagcagcctcgtgcgaaagcttggcgagcgctctgcgtgccaaacgccattttaaagaattagcggtttcgaacaacgaactgggtgaagcaggcgtgcgcgtactttgtcgtgggctggtggatagtgcgtgccaactggaggttctgaaactggaaaattgtggattgacctctgcctcctgcgaggatctttgtggtgtggtcgctagcaaaccaagcctccaggaattggaccttggcgataacaaattaggtgaccaaggcatcgcaacgttatgcccgcgcctgcttcacccttcatgccagattcgtgttttgtggctctgggattgtgatatcaccaccgccggctgccgcgacctctgtcgtgtattacgcgcgaaggaatccctcaaagagatgagtcttgcgggtaatgccttgggagatgaaggcgcacgtctcttgtgcgaatcgttattagaaccggcgtgccagctccagagcctttgggtgaaaagctgttctttcactgctgcttcatgccagcattttagttcgatgttggcgcgcaacacgtgtcttgtcgagctccaattgagcaataataaattaggtgattgtggcgtgcagcagctttgccaagggttatctcaaccaggtgccgccctccaggttttgtggttgggcgactgtgatgtagcacatagtggctgtgcaagcttagcttccgtgttgcttgtcaaccgttccttacgcgaactcgaccttagtaacaactgcatgggcgaagaagggattctccgtttgatggagagcgttgaacaaccgggatgcgtgcttgaacagttggtcctctatgacatctactggtcggaggagatggataattctttacgtgccttagaaggtcgcaaaccgtcattgcgcgtgattttc

SEQ ID NO: 28 - protein, 468 aa, synthetic construct
  REGION 1..468: note = Variant of RNase inhibitor
MHHHHHHGGSGTMSLDIQCQQLSDARWTELLPLLQQSEVVRLDDCGLTEMRCKDISSALQANPSLTELSLCTNELGDAGVHLVLQGLQSPTCKIRKLSLQNCCLTKTGCGVLPDMLRSMPTLRELYLNDNPLGDAGLQLLCSGLLDPQCHLEKLQVEYCNLTAASCESLASALRAKRHFKELAVSNNELGEAGVRVLCRGLVDSACQLEVLKLENCGLTSASCEDLCGVVASKPSLQELDLGDNKLGDQGIATLCPRLLHPSCQIRVLWLWDCDITTAGCRDLCRVLRAKESLKEMSLAGNALGDEGARLLCESLLEPACQLQSLWVKSCSFTAASCQHFSSMLARNTCLVELQLSNNKLGDCGVQQLCQGLSQPGAALQVLWLGDCDVAHSGCASLASVLLVNRSLRELDLSNNCMGEEGILRLMESVEQPGCVLEQLVLYDIYWSEEMDNSLRALEGRKPSLRVIF

SEQ ID NO: 29 - DNA, 1404 bp, synthetic construct
  misc_feature 1..1404: note = Variant of RNase inhibitor
  source 1..1404: mol_type = other DNA
atgcaccatcatcatcatcatggcggtagcggcaccatgtctctggatattcagtgtcaacaattgtcagatgcgcgttggacggaactgttaccgcttctgcaacagagcgaagtggtgcgcctggatgactgcggcctcactgagatgcgctgcaaagacatcagtagtgcactgcaagccaacccatcgttgaccgaattaagcctgtgtacaaatgagctgggtgatgctggagttcatttagtcctgcagggcttgcagtctcctacctgcaagattcgtaaactgtccctccagaactgttgtctgacgaagactggttgcggtgtattaccggacatgcttcgttcaatgcccaccctgcgcgaactgtatctgaatgataacccgttgggcgatgcgggcctccagctgctttgctccgggctgttagacccgcaatgtcacctggagaaactgcaggtggaatactgcaatctcacagcagcctcgtgcgaaagcttggcgagcgctctgcgtgccaaacgccattttaaagaattagcggtttcgaacaacgaactgggtgaagcaggcgtgcgcgtactttgtcgtgggctggtggatagtgcgtgccaactggaggttctgaaactggaaaattgtggattgacctctgcctcctgcgaggatctttgtggtgtggtcgctagcaaaccaagcctccaggaattggaccttggcgataacaaattaggtgaccaaggcatcgcaacgttatgcccgtttctgcttcacccttcatgccagattcgtgttttgtggctctgggattgtgatatcaccaccgccggctgccgcgacctctgtcgtgtattacgcgcgaaggaatccctcaaagagatgagtcttgcgggtaatgccttgggagatgaaggcgcacgtctcttgtgcgaatcgttattagaaccggcgtgccagctccagagcctttgggtgaaaagctgttctttcactgctgcttcatgccagcattttagttcgatgttgacgcgcaacacgtgtcttgtcgagctccaattgagcaataataaattaggtgattgtggcgtgcagcagctttgccaagggttatctcaaccaggtgccgccctccaggttttgtggttgggcgactgtgatgtagcacatagtggctgtgcaagcttagcttccgtgttgcttgtcaaccgttccttacgcgaactcgaccttagtaacaactgcatgggcgaagaagggattctccgtttgatggagagcgttgaacaaccgggatgcgtgcttgaacagttggtcctctatgacatctactggtcggaggagatggataattctttacgtgccttagaaggtcgcaaaccgtcattgcgcgtgattttc

SEQ ID NO: 30 - protein, 468 aa, synthetic construct
  REGION 1..468: note = Variant of RNase inhibitor
MHHHHHHGGSGTMSLDIQCQQLSDARWTELLPLLQQSEVVRLDDCGLTEMRCKDISSALQANPSLTELSLCTNELGDAGVHLVLQGLQSPTCKIRKLSLQNCCLTKTGCGVLPDMLRSMPTLRELYLNDNPLGDAGLQLLCSGLLDPQCHLEKLQVEYCNLTAASCESLASALRAKRHFKELAVSNNELGEAGVRVLCRGLVDSACQLEVLKLENCGLTSASCEDLCGVVASKPSLQELDLGDNKLGDQGIATLCPFLLHPSCQIRVLWLWDCDITTAGCRDLCRVLRAKESLKEMSLAGNALGDEGARLLCESLLEPACQLQSLWVKSCSFTAASCQHFSSMLTRNTCLVELQLSNNKLGDCGVQQLCQGLSQPGAALQVLWLGDCDVAHSGCASLASVLLVNRSLRELDLSNNCMGEEGILRLMESVEQPGCVLEQLVLYDIYWSEEMDNSLRALEGRKPSLRVIF

SEQ ID NO: 31 - DNA, 1404 bp, synthetic construct
  misc_feature 1..1404: note = Variant of RNase inhibitor
  source 1..1404: mol_type = other DNA
atgcaccatcatcatcatcatggcggtagcggcaccatgtctctggatattcagtgtcagcaattgtcagatgcgcgttggacggaactgttaccgcttctgcaacagagcgaagtggtgcgcctggatgactgcggcctcactgagatgcgctgcaaagacatcagtagtgcactgcaagccaacccatcgttgaccgaattaagcctgtgtacaaatgagctgggtgatgctggagttcatttagtcctgcagggcttgcagtctcctacctgcaagattcgtaaactgtccctccagaactgttgtctgacgaagactggttgcggtgtattaccggacatgcttcgttcaatgcccaccctgcgcgaactgtatctgaatgataacccgttgggcgatgcgggcctccagctgctttgctccgggctgttagacccgcaatgtcacctggagaaactgcaggtcgaatactgcaatctcacagcagcctcgtgcgaaagcttggcgagcgctctgcgtgccaaacgccattttaaagaattagcggtttcgaacaacgaactgggtgaagcaggcgtgcgcgtactttgtcgtgggctggtggatagtgcgtgccaactggaggttctgaaactggaaaattgtggattgacctctgcctcctgcgaggatctttgtggtgtggtcgctagcaaaccaagcctccaggaattggaccttggcgataacaaattaggtgaccaaggcatcgcaacgttatgcccgcgcctgcttcacccttcatgccagattcgtgttttgtggctctgggattgtgatatcaccaccgccggctgccgcgacctctgtcgtgtattacgcgcgaaggaatccctcaaagagctgagtcttgcgggtaatgccttgggagatgaaggcgcacgtctcttgtgcgaatcgttattagaaccggcgtgccagctccagagcctttgggtgaaaagctgttctttcactgctgcttcatgccagcattttagttcgatgttgacgcgcaacacgtgtcttgtcgagctccaattgagcaataataaattaggtgattgtggcgtgcagcagctttgccaagggttatctcaaccaggtgccgccctccaggttttgtggttgggcgactgtgatgtagcacatagtggctgtgcaagcttagcttccgtgttgcttgtcaaccgttccttacgcgaactcgaccttagtaacaactgcatgggcgaagaagggattctccgtttgatggagagcgttgaacaaccgggatgcgtgcttgaacagttggtcctctatgacatctactggtcggaggagatggataattctttacgtgccttagaaggtcgcaaaccgtcattgcgcgtgattttc

SEQ ID NO: 32 - protein, 468 aa, synthetic construct
  REGION 1..468: note = Variant of RNase inhibitor
MHHHHHHGGSGTMSLDIQCQQLSDARWTELLPLLQQSEVVRLDDCGLTEMRCKDISSALQANPSLTELSLCTNELGDAGVHLVLQGLQSPTCKIRKLSLQNCCLTKTGCGVLPDMLRSMPTLRELYLNDNPLGDAGLQLLCSGLLDPQCHLEKLQVEYCNLTAASCESLASALRAKRHFKELAVSNNELGEAGVRVLCRGLVDSACQLEVLKLENCGLTSASCEDLCGVVASKPSLQELDLGDNKLGDQGIATLCPRLLHPSCQIRVLWLWDCDITTAGCRDLCRVLRAKESLKELSLAGNALGDEGARLLCESLLEPACQLQSLWVKSCSFTAASCQHFSSMLTRNTCLVELQLSNNKLGDCGVQQLCQGLSQPGAALQVLWLGDCDVAHSGCASLASVLLVNRSLRELDLSNNCMGEEGILRLMESVEQPGCVLEQLVLYDIYWSEEMDNSLRALEGRKPSLRVIF

SEQ ID NO: 33 - DNA, 1404 bp, synthetic construct
  misc_feature 1..1404: note = Variant of RNase inhibitor
  source 1..1404: mol_type = other DNA
atgcaccatcatcatcatcatggcggtagcggcaccatgtctctggatattcagtgtcagcaattgtcagatgcgcgttggacggaactgttaccgcttctgcaacagagcgaagtggtgcgcctggatgactgcggcctcactgagatgcgctgcaaagacatcagtagtgcactgcaagccaacccatcgttgaccgaattaagcctgtgtacaaatgagctgggtgatgctggagttcatttagtcctgcagggcttgcagtctcctacctgcaagattcgtaaactgtccctccagaactgttgtctgacgaagactggttgcggtgtattaggggacatgcttcgttcaatgcccaccctgcgcgaactgtatctgaatgataacccgttgggcgatgcgggcctccagctgctttgctccgggctgttagacccgcaatgtcacctggagaaactgcaggtcgaatactgcaatctcacagcagcctcgtgcgaaagcttggcgagcgctctgcgtgccaaacgccattttaaagaattagcggtttcgaacaacgaactgggtgaagcaggcgtgcgcgtactttgtcgtgggctggtggatagtgcgtgccaactggaggttctgaaactggaaaattgtggattgacctctgcctcctgcgaggatctttgtggtgtggtcgctagcaaaccaagcctccaggaattggaccttggcgataacaaattaggtgaccaaggcatcgcaacgttatgcccgcgcctgcttcacccttcatgccagattcgtgttttgtggctctgggattgtgatatcaccaccgccggctgccgcgacctctgtcgtgtattacgcgcgaaggaatccctcaaagagatgagtcttgcgggtaatgccttgggagatgaaggcgcacgtctcttgtgcgaatcgttattagaaccggcgtgccagctccagagcctttgggtgaaaagctgttctttcactgctgcttcatgccagcattttagttcgatgttgacgcgcaacacgtgtcttgtcgagctccaattgagcaataataaattaggtgattgtggcgtgcagcagctttgccaagggttatctcaaccaggtgccgccctccaggttttgtggttgggcgactgtgatgtagcacatagtggctgtgcaagcttagcttccgtgttgcttgtcaaccgttccttacgcgaactcgaccttagtaacaactgcatgggcgaagaagggattctccgtttgatggagagcgttgaacaaccgggatgcgtgcttgaacagttggtcctctatgacatctactggtcggaggagatggataattctttacgtgccttagaaggtcgcaaaccgtcattgcgcgtgattttc

SEQ ID NO: 34 - protein, 468 aa, synthetic construct
  REGION 1..468: note = Variant of RNase inhibitor
MHHHHHHGGSGTMSLDIQCQQLSDARWTELLPLLQQSEVVRLDDCGLTEMRCKDISSALQANPSLTELSLCTNELGDAGVHLVLQGLQSPTCKIRKLSLQNCCLTKTGCGVLGDMLRSMPTLRELYLNDNPLGDAGLQLLCSGLLDPQCHLEKLQVEYCNLTAASCESLASALRAKRHFKELAVSNNELGEAGVRVLCRGLVDSACQLEVLKLENCGLTSASCEDLCGVVASKPSLQELDLGDNKLGDQGIATLCPRLLHPSCQIRVLWLWDCDITTAGCRDLCRVLRAKESLKEMSLAGNALGDEGARLLCESLLEPACQLQSLWVKSCSFTAASCQHFSSMLTRNTCLVELQLSNNKLGDCGVQQLCQGLSQPGAALQVLWLGDCDVAHSGCASLASVLLVNRSLRELDLSNNCMGEEGILRLMESVEQPGCVLEQLVLYDIYWSEEMDNSLRALEGRKPSLRVIF

SEQ ID NO: 35 - DNA, 1404 bp, synthetic construct
  misc_feature 1..1404: note = Variant of RNase inhibitor
  source 1..1404: mol_type = other DNA
atgcaccatcatcatcatcatggcggtagcggcaccatgtctctggatattcagtgtcaacaattgtcagatgcgcgttggacggaactgttaccgcttctgcaacagagcgaagtggtgcgcctggatgactgcggcctcactgagatgcgctgcaaagacatcagtagtgcactgcaagccaacccatcgttgaccgaattaagcctgtgtacaaatgagctgggtgatgctggagttcatttagtcctgcagggcttgcagtctcctacctgcaagattgaaaaactgtccctccagaactgttgtctgacgaagactggttgcggtgtattaccggacatgcttcgttcaatgcccaccctgcgcgaactgtatctgaatgataacccgttgggcgatgcgggcctccagctgctttgctccgggctgttagacccgcaatgtcacctggagaaactgcaggtggaatactgcaatctcacagcagcctcgtgcgaaagcttggcgagcgctctgcgtgccaaacgccattttaaagaattagcggtttcgaacaacgaactgggtgaagcaggcgtgcgcgtactttgtcgtgggctggtggatagtgcgtgccaactggaggttctgaaactggaaaattgtggattgacctctgcctcctgcgaggatctttgtggtgtggtcgctagcaaaccaagcctccaggaattggaccttggcgataacaaattaggtgaccaaggcatcgcaacgttatgcccgcgcctgcttcacccttcatgccagattcgtgttttgtggctctgggattgtgatatcaccaccgccggctgccgcgacctctgtcgtgtattacgcgcgaaggaatccctcaaagagctgagtcttgcgggtaatgccttgggagatgaaggcgcacgtctcttgtgcgaatcgttattagaaccggcgtgccagctccagagcctttgggtgaaaagctgttctttcactgctgcttcatgccagcattttagttcgatgttgacgcgcaacacgtgtcttgtcgagctccaattgagcaataataaattaggtgattgtggcgtgcagcagctttgccaagggttatctcaaccaggtgccgccctccaggttttgtggttgggcgactgtgatgtagcacatagtggctgtgcaagcttagcttccgtgttgcttgtcaaccgttccttacgcgaactcgaccttagtaacaactgcatgggcgaagaagggattctccgtttgatggagagcgttgaacaaccgggatgcgtgcttgaacagttggtcctctatgacatctactggtcggaggagatggataattctttacgtgccttagaagagcgcaaaccgtcattgcgcgtgattttc

SEQ ID NO: 36 - protein, 468 aa, synthetic construct
  REGION 1..468: note = Variant of RNase inhibitor
MHHHHHHGGSGTMSLDIQCQQLSDARWTELLPLLQQSEVVRLDDCGLTEMRCKDISSALQANPSLTELSLCTNELGDAGVHLVLQGLQSPTCKIEKLSLQNCCLTKTGCGVLPDMLRSMPTLRELYLNDNPLGDAGLQLLCSGLLDPQCHLEKLQVEYCNLTAASCESLASALRAKRHFKELAVSNNELGEAGVRVLCRGLVDSACQLEVLKLENCGLTSASCEDLCGVVASKPSLQELDLGDNKLGDQGIATLCPRLLHPSCQIRVLWLWDCDITTAGCRDLCRVLRAKESLKELSLAGNALGDEGARLLCESLLEPACQLQSLWVKSCSFTAASCQHFSSMLTRNTCLVELQLSNNKLGDCGVQQLCQGLSQPGAALQVLWLGDCDVAHSGCASLASVLLVNRSLRELDLSNNCMGEEGILRLMESVEQPGCVLEQLVLYDIYWSEEMDNSLRALEERKPSLRVIF

SEQ ID NO: 37 - DNA, 1404 bp, synthetic construct
  misc_feature 1..1404: note = Variant of RNase inhibitor
  source 1..1404: mol_type = other DNA
atgcaccatcatcatcatcatggcggtagcggcaccatgtctctggatattcagtgtcagcaattgtcagatgcgcgttggacggaactgttaccgcttctgcaacagagcgaagtggtgcgcctggatgactgcggcctcactgagatgcgctgcaaagacatcagtagtgcactgcaagccaacccatcgttgaccgaattaagcctgtgtacaaatgagctgggtgatgctggagttcatttagtcctgcagggcttgcagtctcctacctgcaagattcgtaaactgtccctccagaactgttgtctgacgaagactggttgcggtgtattaccggacatgcttcgttcaatgcccaccctgcgcgaactgtatctgaatgataacccgttgggcgatgcgggcctccagctgctttgctccgggctgttagacccgcaatgtcacctggagaaactgcaggtcgaatactgcaatctcacagcagcctcgtgcgaaagcttggcgagcgctctgcgtgccaaacgccattttaaagaattagcggtttcgaacaacgaactgggtgaagcaggcgtgcgcgtactttgtcgtgggctggtggatagtgcgtgccaactggaggttctgaaactggaaaattgtggattgacctctgcctcctgcgaggatctttgtggtgtggtcgctagcaaaccaagcctccaggaattggaccttggcgataacaaattaggtgaccaaggcatcgcaacgttatgcccggtgctgcttcacccttcatgccagattcgtgttttgtggctctgggattgtgatatcaccaccgccggctgccgcgacctctgtcgtgtattacgcgcgaaggaatccctcaaagagatgagtcttgcgggtaatgccttgggagatgaaggcgcacgtctcttgtgcgaatcgttattagaaccggcgtgccagctccagagcctttgggtgaaaagctgttctttcactgctgcttcatgccagcattttagttcgatgttgacgcgcaacacgtgtcttgtcgagctccaattgagcaataataaattaggtgattgtggcgtgcagcagctttgccaagggttatctcaaccaggtgccgccctccaggttttgtggttgggcgactgtgatgtagcacatagtggctgtgcaagcttagcttccgtgttgcttgtcaaccgttccttacgcgaactcgaccttagtaacaactgcatgggcgaagaagggattctccgtttgatggagagcgttgaacaaccgggatgcgtgcttgaacagttggtcctctatgacatctactggtcggaggagatggataattctttacgtgccttagaaggtcgcaaaccgtcattgcgcgtgattttc

SEQ ID NO: 38 - protein, 468 aa, synthetic construct
  REGION 1..468: note = Variant of RNase inhibitor
MHHHHHHGGSGTMSLDIQCQQLSDARWTELLPLLQQSEVVRLDDCGLTEMRCKDISSALQANPSLTELSLCTNELGDAGVHLVLQGLQSPTCKIRKLSLQNCCLTKTGCGVLPDMLRSMPTLRELYLNDNPLGDAGLQLLCSGLLDPQCHLEKLQVEYCNLTAASCESLASALRAKRHFKELAVSNNELGEAGVRVLCRGLVDSACQLEVLKLENCGLTSASCEDLCGVVASKPSLQELDLGDNKLGDQGIATLCPVLLHPSCQIRVLWLWDCDITTAGCRDLCRVLRAKESLKEMSLAGNALGDEGARLLCESLLEPACQLQSLWVKSCSFTAASCQHFSSMLTRNTCLVELQLSNNKLGDCGVQQLCQGLSQPGAALQVLWLGDCDVAHSGCASLASVLLVNRSLRELDLSNNCMGEEGILRLMESVEQPGCVLEQLVLYDIYWSEEMDNSLRALEGRKPSLRVIF

SEQ ID NO: 39 - DNA, 1404 bp, synthetic construct
  misc_feature 1..1404: note = Variant of RNase inhibitor
  source 1..1404: mol_type = other DNA
atgcaccatcatcatcatcatggcggtagcggcaccatgtctctggatattcagtgtcaacaattgtcagatgcgcgttggacggaactgttaccgcttctgcaacagagcgaagtggtgcgcctggatgactgcggcctcactgagatgcgctgcaaagacatcagtagtgcactgcaagccaacccatcgttgaccgaattaagcctgtgtacaaatgagctgggtgatgctggagttcatttagtcctgcagggcttgcagtctcctacctgcaagattcaaaaactgtccctccagaactgttgtctgacgaagactggttgcggtgtattaccggacatgcttcgttcaatgcccaccctgcgcgaactgtatctgaatgataacccgttgggcgatgcgggcctccagctgctttgctccgggctgttagacccgcaatgtcacctggagaaactgcaggtggaatactgcaatctcacagcagcctcgtgcgaaagcttggcgagcgctctgcgtgccaaacgccattttaaagaattagcggtttcgaacaacgaactgggtgaagcaggcgtgcgcgtactttgtcgtgggctggtggatagtgcgtgccaactggaggttctgaaactggaaaattgtggattgacctctgcctcctgcgaggatctttgtggtgtggtcgctagcaaaccaagcctccaggaattggaccttggcgataacaaattaggtgaccaaggcatcgcaacgttatgcccgtttctgcttcacccttcatgccagattcgtgttttgtggctctgggattgtgatatcaccaccgccggctgccgcgacctctgtcgtgtattacgcgcgaaggaatccctcaaagagattagtcttgcgggtaatgccttgggagatgaaggcgcacgtctcttgtgcgaatcgttattagaaccggcgtgccagctccagagcctttgggtgaaaagctgttctttcactgctgcttcatgccagcattttagttcgatgttgacgcgcaacacgtgtcttgtcgagctccaattgagcaataataaattaggtgattgtggcgtgcagcagctttgccaagggttatctcaaccaggtgccgccctccaggttttgtggttgggcgactgtgatgtagcacatagtggctgtgcaagcttagcttccgtgttgcttgtcaaccgttccttacgcgaactcgaccttagtaacaactgcatgggcgaagaagggattctccgtttgatggagagcgttgaacaaccgggatgcgtgcttgaacagttggtcctctatgacatctactggtcggaggagatggataattctttacgtgccttagaagggcgcaaaccgtcattgcgcgtgattttc

SEQ ID NO: 40 - protein, 468 aa, synthetic construct
  REGION 1..468: note = Variant of RNase inhibitor
MHHHHHHGGSGTMSLDIQCQQLSDARWTELLPLLQQSEVVRLDDCGLTEMRCKDISSALQANPSLTELSLCTNELGDAGVHLVLQGLQSPTCKIQKLSLQNCCLTKTGCGVLPDMLRSMPTLRELYLNDNPLGDAGLQLLCSGLLDPQCHLEKLQVEYCNLTAASCESLASALRAKRHFKELAVSNNELGEAGVRVLCRGLVDSACQLEVLKLENCGLTSASCEDLCGVVASKPSLQELDLGDNKLGDQGIATLCPFLLHPSCQIRVLWLWDCDITTAGCRDLCRVLRAKESLKEISLAGNALGDEGARLLCESLLEPACQLQSLWVKSCSFTAASCQHFSSMLTRNTCLVELQLSNNKLGDCGVQQLCQGLSQPGAALQVLWLGDCDVAHSGCASLASVLLVNRSLRELDLSNNCMGEEGILRLMESVEQPGCVLEQLVLYDIYWSEEMDNSLRALEGRKPSLRVIF

SEQ ID NO: 41 - DNA, 1404 bp, synthetic construct
  misc_feature 1..1404: note = Variant of RNase inhibitor
  source 1..1404: mol_type = other DNA
atgcaccatcatcatcatcatggcggtagcggcaccatgtctctggatattcagtgtcagcaattgtcagatgcgcgttggacggaactgttaccgcttctgcaacagagcgaagtggtgcgcctggatgactgcggcctcactgagatgcgctgcaaagacatcagtagtgcactgcaagccaacccatcgttgaccgaattaagcctgtgtacaaatgagctgggtgatgctggagttcatttagtcctgcagggcttgcagtctcctacctgcaagattcgtaaactgtccctccagaactgttgtctgacgaagactggttgcggtgtattaccggacatgcttcgttcaatgcccaccctgcgcgaactgtatctgaatgataacccgttgggcgatgcgggcctccagctgctttgctccgggctgttagacccgcaatgtcacctggagaaactgcaggtcgaatactgcaatctcacagcagcctcgtgcgaaagcttggcgagcgctctgcgtgccaaacgccattttaaagaattagcggtttcgaacaacgaactgggtgaagcaggcgtgcgcgtactttgtcgtgggctggtggatagtgcgtgccaactggaggttctgaaactggaaaattgtggattgacctctgcctcctgcgaggatctttgtggtgtggtcgctagcaaaccaagcctccaggaattggaccttggcgataacaaattaggtgaccaaggcatcgcaacgttatgcccgcgcctgcttcacccttcatgccagattcgtgttttgtggctctgggattgtgatatcaccaccgccggctgccgcgacctctgtcgtgtattacgcgcgaaggaatccctcaaagagatgagtcttgcgggtaatgccttgggagatgaaggcgcacgtctcttgtgcgaatcgttattagaaccggcgtgccagctccagagcctttgggtgaaaagctgttctttcactgctgcttcatgccagcattttagttcgatgttgacgcgcaacacgtgtcttgtcgagctccaattgagcaataataaattaggtgattgtggcgtgcagcagctttgccaagggttatctcaaccaggtgccgccctccaggttttgtggttgggcgactgtgatgtagcacatagtggctgtgcaagcttagcttccgtgttgcttgtcaaccgttccttacgcgaactcgaccttagtaacaactgcatgggcgaagaagggattctccgtttgatggagagcgttgaacaaccgggatgcgtgcttgaacagttggtcctctatgacatctactggtcggaggagatggataatatgttacgtgccttagaaggtcgcaaaccgtcattgcgcgtgattttc

SEQ ID NO: 42 - protein, 468 aa, synthetic construct
  REGION 1..468: note = Variant of RNase inhibitor
MHHHHHHGGSGTMSLDIQCQQLSDARWTELLPLLQQSEVVRLDDCGLTEMRCKDISSALQANPSLTELSLCTNELGDAGVHLVLQGLQSPTCKIRKLSLQNCCLTKTGCGVLPDMLRSMPTLRELYLNDNPLGDAGLQLLCSGLLDPQCHLEKLQVEYCNLTAASCESLASALRAKRHFKELAVSNNELGEAGVRVLCRGLVDSACQLEVLKLENCGLTSASCEDLCGVVASKPSLQELDLGDNKLGDQGIATLCPRLLHPSCQIRVLWLWDCDITTAGCRDLCRVLRAKESLKEMSLAGNALGDEGARLLCESLLEPACQLQSLWVKSCSFTAASCQHFSSMLTRNTCLVELQLSNNKLGDCGVQQLCQGLSQPGAALQVLWLGDCDVAHSGCASLASVLLVNRSLRELDLSNNCMGEEGILRLMESVEQPGCVLEQLVLYDIYWSEEMDNMLRALEGRKPSLRVIF

SEQ ID NO: 43 - DNA, 1404 bp, synthetic construct
  misc_feature 1..1404: note = Variant of RNase inhibitor
  source 1..1404: mol_type = other DNA
atgcaccatcatcatcatcatggcggtagcggcaccatgtctctggatattcagtgtcagcaattgtcagatgcgcgttggacggaactgttaccgcttctgcaacagagcgaagtggtgcgcctggatgactgcggcctcactgagatgcgctgcaaagacatcagtagtgcactgcaagccaacccatcgttgaccgaattaagcctgtgtacaaatgagctgggtgatgctggagttcatttagtgctgcagggcttgcagtctcctacctgcaagattcgtaaactgtccctccagaactgttgtctgacgaagattggttgcggtgtattaccggacatgcttcgttcaatgcccaccctgcgcgaactgtatctgaatgataacccgttgggcgatgcgggcctccagctgctttgctccgggctgttagacccgcaatgtcacctggagaaactgcaggtcgaatactgcaatctcacagcagcctcgtgcgaaagcttggcgagcgctctgcgtgccaaacgccattttaaagaattagcggtttcgaacaacgaactgggtgaagcaggcgtgcgcgtactttgtcgtgggctggtggatagtgcgtgccaactggaggttctgaaactggaaaattgtggattgacctctgcctcctgcgaggatctttgtggtgtggtcgctagcaaaccaagcctccaggaattggaccttggcgataacaaattaggtgaccaaggcatcgcaacgttatgcccgcgcctgcttcacccttcatgccagattcgtaagttgtggctctgggattgtgatatcaccaccgccggctgccgcgacctctgtcgtgtattacgcgcgaaggaatccctcaaagagatgagtcttgcgggtaatgccttgggagatgaaggcgcacgtctcttgtgcgaatcgttattagaaccggcgtgccagctccagagcctttgggtgaaaagctgttctttcactgctgcttcatgccagcattttagttcgatgttgacgcgcaacacgtgtcttgtcgagctccaattgagcaataataaattaggtgattgtggcgtgcagcagctttgccaagggttatctcaaccaggtgccgccctccaggttttgtggttgggcgactgtgatgtagcacatagtggctgtgcaagcttagcttccgtgttgcttgtcaaccgttccttacgcgaactcgaccttagtaacaactgcatgggcgaagaagggattctccgtttgatggagagcgtggaacaaccgggatgcgtgcttgaacagttggtcctctatgacatctactggtcggaggagatggataattctttacgtgccttagaaggtcgcaaaccgtcattgcgcgtgattttc

SEQ ID NO: 44 - protein, 468 aa, synthetic construct
  REGION 1..468: note = Variant of RNase inhibitor
MHHHHHHGGSGTMSLDIQCQQLSDARWTELLPLLQQSEVVRLDDCGLTEMRCKDISSALQANPSLTELSLCTNELGDAGVHLVLQGLQSPTCKIRKLSLQNCCLTKIGCGVLPDMLRSMPTLRELYLNDNPLGDAGLQLLCSGLLDPQCHLEKLQVEYCNLTAASCESLASALRAKRHFKELAVSNNELGEAGVRVLCRGLVDSACQLEVLKLENCGLTSASCEDLCGVVASKPSLQELDLGDNKLGDQGIATLCPRLLHPSCQIRKLWLWDCDITTAGCRDLCRVLRAKESLKEMSLAGNALGDEGARLLCESLLEPACQLQSLWVKSCSFTAASCQHFSSMLTRNTCLVELQLSNNKLGDCGVQQLCQGLSQPGAALQVLWLGDCDVAHSGCASLASVLLVNRSLRELDLSNNCMGEEGILRLMESVEQPGCVLEQLVLYDIYWSEEMDNSLRALEGRKPSLRVIF

SEQ ID NO: 45 - DNA, 1404 bp, synthetic construct
  misc_feature 1..1404: note = Variant of RNase inhibitor
  source 1..1404: mol_type = other DNA
atgcaccatcatcatcatcatggcggtagcggcaccatgtctctggatattcagtgtcaacaattgtcagatgcgcgttggacggaactgttaccgcttctgcaacagagcgaagtggtgcgcctggatgactgcggcctcactgagatgcgctgcaaagacatcagtagtgcactgcaagccaacccatcgttgaccgaattaagcctgtgtacaaatgagctgggtgatgctggagttcatttagtcctgcagggcttgcagtctcctacctgcaagattcgcaaactgtccctccagaactgttgtctgacgaagactggttgcggtgtattaccggacatgcttcgttcaatgcccaccctgcgcgaactgtatctgaatgataacccgttgggcgatgcgggcctccagctgctttgctccgggctgttagacccgcaatgtcacctggagaaactgcaggtcgaatactgcaatctcacagcagcctcgtgcgaaagcttggcgagcgctctgcgtgccaaacgccattttaaagaattagcggtttcgaacaacgaactgggtgaagcaggcgtgcgcgtactttgtcgtgggctggtggatagtgcgtgccaactggaggttctgaaactggaaaattgtggattgacctctgcctcctgcgaggatctttgtggtgtggtcgctagcaaaccaagcctccaggaattggaccttggcgataacaaattaggtgaccaaggcatcgcaacgttatgcccgcgcctgcttcacccttcatgccagattcgtgttttgtggctctgggattgtgatatcaccaccgccggctgccgcgacctctgtcgtgtattacgcgcgaaggaatccctcaaagagatgagtcttgcgggtaatgccttgggagatgaaggcgcacgtctcttgtgcgaatcgttattagaaccggcgtgccagctccagagcctttgggtgaaaagctgttctttcactgctgcttcatgccagcattttagttcgatgttgacgcgcaacacgtgtcttgtcgagctccaattgagcaataataaattaggtgattgtggcgtgcagcagctttgccaagggttatctcaaccaggtgccgccctccaggttttgtggttgggcgactgtgatgtagcacatagtggctgtgcaagcttagcttccgtgttgcttgtcaaccgttccttacgcgaactcgaccttagtaacaactgcctgggcgaggaaggggttctccgtttgatggagagcgttgaacaaccgggatgcgtgcttgaacagttggtcctctatgacatctactggtcggaggagatggataattctttacgtgccttagaagagcgcaaaccgtcattgcgcgtgattttc

SEQ ID NO: 46 - protein, 468 aa, synthetic construct
  REGION 1..468: note = Variant of RNase inhibitor
MHHHHHHGGSGTMSLDIQCQQLSDARWTELLPLLQQSEVVRLDDCGLTEMRCKDISSALQANPSLTELSLCTNELGDAGVHLVLQGLQSPTCKIRKLSLQNCCLTKTGCGVLPDMLRSMPTLRELYLNDNPLGDAGLQLLCSGLLDPQCHLEKLQVEYCNLTAASCESLASALRAKRHFKELAVSNNELGEAGVRVLCRGLVDSACQLEVLKLENCGLTSASCEDLCGVVASKPSLQELDLGDNKLGDQGIATLCPRLLHPSCQIRVLWLWDCDITTAGCRDLCRVLRAKESLKEMSLAGNALGDEGARLLCESLLEPACQLQSLWVKSCSFTAASCQHFSSMLTRNTCLVELQLSNNKLGDCGVQQLCQGLSQPGAALQVLWLGDCDVAHSGCASLASVLLVNRSLRELDLSNNCLGEEGVLRLMESVEQPGCVLEQLVLYDIYWSEEMDNSLRALEERKPSLRVIF

SEQ ID NO: 47 - DNA, 1404 bp, synthetic construct
  misc_feature 1..1404: note = Variant of RNase inhibitor
  source 1..1404: mol_type = other DNA
atgcaccatcatcatcatcatggcggtagcggcaccatgtctctggatattcagtgtcagcaattgtcagatgcgcgttggacggaactgttaccgcttctgcaacagagcgaagtggtgcgcctggatgactgcggcctcactgagatgcgctgcaaagacatcagtagtgcactgcaagccaacccatcgttgaccgaattaagcctgtgtacaaatgagctgggtgatgctggagttcatttagtcctgcagggcttgcagtctcctacctgcaagattcgtaaactgtccctccagaactgttgtctgacgaagactggttgcggtgtattaccggacatgcttcgttcaatgcccaccctgcgcgaactgtatctgaatgataacccgttgggcgatgcgggcctccagctgctttgctccgggctgttagacccgcaatgtcacctggagaaactgcaggtcgaatactgcaatctcacagcagcctcgtgcgaaagcttggcgagcgctctgcgtgccaaacgccattttaaagaattagcggtttcgaacaacgaactgggtgaagcaggcgtgcgcgtactttgtcgtgggctggtggatagtgcgtgccaactggaggttctgaaactggaaaattgtggattgacctctgcctcctgcgaggatctttgtggtgtggtcgctagcaaaccaagcctccaggaattggaccttggcgataacaaattaggtgaccaaggcatcgcaacgttatgcccgcgcctgcttcacccttcatgccagattcgtgttttgtggctctgggattgtgatatcaccaccgccggctgccgcgacctctgtcgtgtattacgcgcgaaggaatccctcaaagagatgagtcttgcgggtaatgccttgggagatgaaggcgcacgtctcttgtgcgaatcgttattagaaccggcgtgccagctccagagcctttgggtgaaaagctgttctttcactgctgcttcatgccagcattttagttcgatgttgacgcgcaacacgtgtcttgtcgagctccaattgagcaataataaattaggtgattgtggcgtgcagcagctttgccaagggttatctcaaccaggtgccgccctccaggttttgtggttgggcgactgtgatgtagcacatagtggctgtcttagcttagcttccgtgttgcttgtcaaccgttccttacgcgaactcgaccttagtaacaactgcatgggcgaagaagggattctccgtttgatggagagcgttgaacaaccgggatgcgtgcttgaacagttggtcctctatgacatctactggtcggaggagatggataattctttacgtgccttagaaggtcgcaaaccgtcattgcgcgtgattttc

SEQ ID NO: 48 - protein, 468 aa, synthetic construct
  REGION 1..468: note = Variant of RNase inhibitor
MHHHHHHGGSGTMSLDIQCQQLSDARWTELLPLLQQSEVVRLDDCGLTEMRCKDISSALQANPSLTELSLCTNELGDAGVHLVLQGLQSPTCKIRKLSLQNCCLTKTGCGVLPDMLRSMPTLRELYLNDNPLGDAGLQLLCSGLLDPQCHLEKLQVEYCNLTAASCESLASALRAKRHFKELAVSNNELGEAGVRVLCRGLVDSACQLEVLKLENCGLTSASCEDLCGVVASKPSLQELDLGDNKLGDQGIATLCPRLLHPSCQIRVLWLWDCDITTAGCRDLCRVLRAKESLKEMSLAGNALGDEGARLLCESLLEPACQLQSLWVKSCSFTAASCQHFSSMLTRNTCLVELQLSNNKLGDCGVQQLCQGLSQPGAALQVLWLGDCDVAHSGCLSLASVLLVNRSLRELDLSNNCMGEEGILRLMESVEQPGCVLEQLVLYDIYWSEEMDNSLRALEGRKPSLRVIF

SEQ ID NO: 49 - DNA, 1404 bp, synthetic construct
  misc_feature 1..1404: note = Variant of RNase inhibitor
  source 1..1404: mol_type = other DNA
atgcaccatcatcatcatcatggcggtagcggcaccatgtctctggatattcagtgtcagcaattgtcagatgcgcgttggacggaactgttaccgcttctgcaacagagcgaagtggtgcgcctggatgactgcggcctcactgagatgcgctgcaaagacatcagtagtgcactgcaagccaacccatcgttgaccgaattaagcctgtgtacaaatgagctgggtgatgctggagttcatttagtcctgcagggcttgcagtctcctacctgcaagattcgtaaactgtccctccagaactgttgtctgacgaagactggttgcggtgtattaccggacatgcttcgttcaatgcccaccctgcgcgaactgtatctgaatgataacccgttgggcgatgcgggcctccagctgctttgctccgggctgttagacccgcaatgtcacctggagaaactgcaggtcgaatactgcaatctcacagcagcctcgtgcgaaagcttggcgagcgctctgcgtgccaaacgccattttaaagaattagcggtttcgaacaacgaactgggtgaagcaggcgtgcgcgtactttgtcgtgggctggtggatagtgcgtgccaactggaggttctgaaactggaaaattgtggattgacctctgcctcctgcgaggatctttgtggtgtggtcgctagcaaaccaagcctccaggaattggaccttggcgataacaaattaggtgaccaaggcatcgcaacgttatgcccgcgcctgcttcacccttcatgccagattcgtgttttgtggctctgggattgtgatatcaccaccgccggctgccgcgacctctgtcgtgtattacgcgcgaaggaatccctcaaagagatgagtcttgcgggtaatgccttgggagatgaaggcgcacgtctcttgtgcgaatcgttattagaaccggcgtgccagctccagagcctttgggtgaaaagctgttctttcactgctgcttcatgccagcattttagttcgatgttgacgcgcaacacgtgtcttgtcgagctccaattgagcaataataaattaggtgattgtggcgtgcagcagctttgccaagggttatctcaaccaggtgccgccctccaggttttgtggttgggcgactgtgatgtaagtcatagtggctgtgcaagcttagcttccgtgttgcttgtcaaccgttccttacgcgaactcgaccttagtaacaactgcatgggcgaagaagggattctccgtttgatggagagcgttgaacaaccgggatgcgtgcttgaacagttggtcctctatgacatctactggtcggaggagatggataattctttacgtgccttagaaggtcgcaaaccgtcattgcgcgtgattttc

SEQ ID NO: 50 - protein, 468 aa, synthetic construct
  REGION 1..468: note = Variant of RNase inhibitor
MHHHHHHGGSGTMSLDIQCQQLSDARWTELLPLLQQSEVVRLDDCGLTEMRCKDISSALQANPSLTELSLCTNELGDAGVHLVLQGLQSPTCKIRKLSLQNCCLTKTGCGVLPDMLRSMPTLRELYLNDNPLGDAGLQLLCSGLLDPQCHLEKLQVEYCNLTAASCESLASALRAKRHFKELAVSNNELGEAGVRVLCRGLVDSACQLEVLKLENCGLTSASCEDLCGVVASKPSLQELDLGDNKLGDQGIATLCPRLLHPSCQIRVLWLWDCDITTAGCRDLCRVLRAKESLKEMSLAGNALGDEGARLLCESLLEPACQLQSLWVKSCSFTAASCQHFSSMLTRNTCLVELQLSNNKLGDCGVQQLCQGLSQPGAALQVLWLGDCDVSHSGCASLASVLLVNRSLRELDLSNNCMGEEGILRLMESVEQPGCVLEQLVLYDIYWSEEMDNSLRALEGRKPSLRVIF

SEQ ID NO: 51 - DNA, 1404 bp, synthetic construct
  misc_feature 1..1404: note = Variant of RNase inhibitor
  source 1..1404: mol_type = other DNA
atgcaccatcatcatcatcatggcggtagcggcaccatgtctctggatattcagtgtcagcaattgtcagatgcgcgttggacggaactgttaccgcttctgcaacagagcgaagtggtgcgcctggatgactgcggcctcactgagatgcgctgcaaagacatcagtagtgcactgcaagccaacccatcgttgaccgaattaagcctgtgtacaaatgagctgggtgatgctggagttcatttagtcctgcagggcttgcagtctcctacctgcaagattcgtaaactgtccctccagaactgttgtctgacgaagactggttgcggtgtattaccggacatgcttcgttcaatgcccaccctgcgcgaactgtatctgaatgataacccgttgggcgatgcgggcctccagctgctttgctccgggctgttagacccgcaatgtcacctggagaaactgcaggtcgaatactgcaatctcacagcagcctcgtgcgaaagcttggcgagcgctctgcgtgccaaacgccattttaaagaattagcggtttcgaacaacgaactgggtgaagcaggcgtgcgcgtactttgtcgtgggctggtggatagtgcgtgccaactggaggttctgaaactggaaaattgtggattgacctctgcctcctgcgaggatctttgtggtgtggtcgctagcaaaccaagcctccaggaattggaccttggcgataacaaattaggtgaccaaggcatcgcaacgttatgcccgggtctgcttcacccttcatgccagattcgtgttttgtggctctgggattgtgatatcaccaccgccggctgccgcgacctctgtcgtgtattacgcgcgaaggaatccctcaaagagattagtcttgcgggtaatgccttgggagatgaaggcgcacgtctcttgtgcgaatcgttattagaaccggcgtgccagctccagagcctttgggtgaaaagctgttctttcactgctgcttcatgccagcattttagttcgatgttgacgcgcaacacgtgtcttgtcgagctccaattgagcaataataaattaggtgattgtggcgtgcagcagctttgccaagggttatctcaaccaggtgccgccctccaggttttgtggttgggcgactgtgatgtagcacatagtggctgtgcaagcttagcttccgtgttgcttgtcaaccgttccttacgcgaactcgaccttagtaacaactgcatgggcgaagaagggattctccgtttgatggagagcgttgaacaaccgggatgcgtgcttgaacagttggtcctctatgacatctactggtcggaggagatggataattctttacgtgccttagaaggtcgcaaaccgtcattgcgcgtgattttc

SEQ ID NO: 52 - protein, 468 aa, synthetic construct
  REGION 1..468: note = Variant of RNase inhibitor
MHHHHHHGGSGTMSLDIQCQQLSDARWTELLPLLQQSEVVRLDDCGLTEMRCKDISSALQANPSLTELSLCTNELGDAGVHLVLQGLQSPTCKIRKLSLQNCCLTKTGCGVLPDMLRSMPTLRELYLNDNPLGDAGLQLLCSGLLDPQCHLEKLQVEYCNLTAASCESLASALRAKRHFKELAVSNNELGEAGVRVLCRGLVDSACQLEVLKLENCGLTSASCEDLCGVVASKPSLQELDLGDNKLGDQGIATLCPGLLHPSCQIRVLWLWDCDITTAGCRDLCRVLRAKESLKEISLAGNALGDEGARLLCESLLEPACQLQSLWVKSCSFTAASCQHFSSMLTRNTCLVELQLSNNKLGDCGVQQLCQGLSQPGAALQVLWLGDCDVAHSGCASLASVLLVNRSLRELDLSNNCMGEEGILRLMESVEQPGCVLEQLVLYDIYWSEEMDNSLRALEGRKPSLRVIF

SEQ ID NO: 53 - DNA, 1404 bp, synthetic construct
  misc_feature 1..1404: note = Variant of RNase inhibitor
  source 1..1404: mol_type = other DNA
atgcaccatcatcatcatcatggcggtagcggcaccatgtctctggatattcagtgtcagcaattgtcagatgcgcgttggacggaactgttaccgcttctgcaacagagcgaagtggtgcgcctggatgactgcggcctcactgagatgcgctgcaaagacatcagtagtgcactgcaagccaacccatcgttgaccgaattaagcctgtgtacaaatgagctgggtgatgctggagttcatttagtcctgcagggcttgcagtctcctacctgcaagattcgtaaactgtccctccagaactgttgtctgacgaagactggttgcggtgtattaccggacatgcttcgttcaatgcccaccctgcgcgaactgtatctgaatgataacccgttgggcgatgcgggcctccagctgctttgctccgggctgttagacccgcaatgtcacctggagaaactgcaggtcgaatactgcaatctcacagcagcctcgtgcgaaagcttggcgagcgctctgcgtgccaaacgccattttaaagaattagcggtttcgaacaacgaactgggtgaagcaggcgtgcgcgtactttgtcgtgggctggtggatagtgcgtgccaactggaggttctgaaactggaaaattgtggattgacctctgcctcctgcgaggatctttgtggtgtggtcgctagcaaaccaagcctccaggaattggaccttggctgtaacaaattaggtgaccaaggcatcgcaacgttatgcccgcgcctgcttcacccttcatgccagattcgtgttttgtggctctgggattgtgatatcaccaccgccggctgccgcgacctctgtcgtgtattacgcgcgaaggaatccctcaaagagatgagtcttgcgggtaatgccttgggagatgaaggcgcacgtctcttgtgcgaatcgttattagaaccggcgtgccagctccagagcctttgggtgaaaagctgttctttcactgctgcttcatgccagcattttagttcgatgttgacgcgcaacacgtgtcttgtcgagctccaattgagcaataataaattaggtgattgtggcgtgcagcagctttgccaagggttatctcaaccaggtgccgccctccaggttttgtggttgggcgactgtgatgtagcacatagtggctgtgcaagcttagcttccgtgttgcttgtcaaccgttccttacgcgaactcgaccttagtaacaactgcatgggcgaagaagggattctccgtttgatggagagcgttgaacaaccgggatgcgtgcttgaacagttggtcctctatgacatctactggtcggaggagatggataattctttacgtgccttagaaggtcgcaaaccgtcattgcgcgtgattttc

SEQ ID NO: 54 - protein, 468 aa, synthetic construct
  REGION 1..468: note = Variant of RNase inhibitor
MHHHHHHGGSGTMSLDIQCQQLSDARWTELLPLLQQSEVVRLDDCGLTEMRCKDISSALQANPSLTELSLCTNELGDAGVHLVLQGLQSPTCKIRKLSLQNCCLTKTGCGVLPDMLRSMPTLRELYLNDNPLGDAGLQLLCSGLLDPQCHLEKLQVEYCNLTAASCESLASALRAKRHFKELAVSNNELGEAGVRVLCRGLVDSACQLEVLKLENCGLTSASCEDLCGVVASKPSLQELDLGCNKLGDQGIATLCPRLLHPSCQIRVLWLWDCDITTAGCRDLCRVLRAKESLKEMSLAGNALGDEGARLLCESLLEPACQLQSLWVKSCSFTAASCQHFSSMLTRNTCLVELQLSNNKLGDCGVQQLCQGLSQPGAALQVLWLGDCDVAHSGCASLASVLLVNRSLRELDLSNNCMGEEGILRLMESVEQPGCVLEQLVLYDIYWSEEMDNSLRALEGRKPSLRVIF

SEQ ID NO: 55 - DNA, 1404 bp, synthetic construct
  misc_feature 1..1404: note = Variant of RNase inhibitor
  source 1..1404: mol_type = other DNA
atgcaccatcatcatcatcatggcggtagcggcaccatgtctctggatattcagtgtcaacaattgtcagatgcgcgttggacggaactgttaccgcttctgcaacagagcgaagtggtgcgcctggatgactgcggcctcactgagatgcgctgcaaagacatcagtagtgcactgcaagccaacccatcgttgaccgaattaagcctgtgtacaaatgagctgggtgatgctggagttcatttagtcctgcagggcttgcagtctcctacctgcaagattcgtaaactgtccctccagaactgttgtctgacgaagactggttgcggtgtattaccggacatgcttcgttcaatgcccaccctgcgcgaactgtatctgaatgataacccgttgggcgatgcgggcctccagctgctttgctccgggctgttagacccgcaatgtcacctggagaaactgcagatggaatactgcaatctcacagcagcctcgtgcgaaagcttggcgagcgctctgcgtgccaaacgccattttaaagaattagcggtttcgaacaacgaactgggtgaagcaggcgtgcgcgtactttgtcgtgggctggtggatagtgcgtgccaactggaggttctgaaactggaaaattgtggattgacctctgcctcctgcgaggatctttgtggtgtggtcgctagcaaaccaagcctccaggaattggaccttggcgataacaaattaggtgaccaaggcatcgcaacgttatgcccgagtctgcttcacccttcatgccagattcgtgttttgtggctctgggattgtgatatcaccaccgccggctgccgcgacctctgtcgtgtattacgcgcgaaggaatccctcaaagagatgagtcttgcgggtaatgccttgggagatgaaggcgcacgtctcttgtgcgaatcgttattagaaccggcgtgccagctccagagcctttgggtgaaaagctgttctttcactgctgcttcatgccagcattttagttcgatgttgacgcgcaacacgtgtcttgtcgagctccaattgagcaataataaattaggtgattgtggcgtgcagcagctttgccaagggttatctcaaccaggtgccgccctccaggttttgtggttgggcgactgtgatgtagcacatagtggctgtgcaagcttagcttccgtgttgcttgtcaaccgttccttacgcgaactcgaccttagtaacaactgcatgggcgaagaagggattctccgtttgatggagagcgttgaacaaccgggatgcgtgcttgaacagttggtcctctatgacatctactggtcggaggagatggataattctttacgtgccttagaaggtcgcaaaccgtcattgcgcgtgattttc

SEQ ID NO: 56 - protein, 468 aa, synthetic construct
  REGION 1..468: note = Variant of RNase inhibitor
MHHHHHHGGSGTMSLDIQCQQLSDARWTELLPLLQQSEVVRLDDCGLTEMRCKDISSALQANPSLTELSLCTNELGDAGVHLVLQGLQSPTCKIRKLSLQNCCLTKTGCGVLPDMLRSMPTLRELYLNDNPLGDAGLQLLCSGLLDPQCHLEKLQMEYCNLTAASCESLASALRAKRHFKELAVSNNELGEAGVRVLCRGLVDSACQLEVLKLENCGLTSASCEDLCGVVASKPSLQELDLGDNKLGDQGIATLCPSLLHPSCQIRVLWLWDCDITTAGCRDLCRVLRAKESLKEMSLAGNALGDEGARLLCESLLEPACQLQSLWVKSCSFTAASCQHFSSMLTRNTCLVELQLSNNKLGDCGVQQLCQGLSQPGAALQVLWLGDCDVAHSGCASLASVLLVNRSLRELDLSNNCMGEEGILRLMESVEQPGCVLEQLVLYDIYWSEEMDNSLRALEGRKPSLRVIF

SEQ ID NO: 57 - DNA, 1404 bp, synthetic construct
  misc_feature 1..1404: note = Variant of RNase inhibitor
  source 1..1404: mol_type = other DNA
atgcaccatcatcatcatcatggcggtagcggcaccatgtctctggatattcagtgtcagcaattgtcagatgcgcgttggacggaactgttaccgcttctgcaacagagcgaagtggtgcgcctggatgactgcggcctcactgagatgcgctgcaaagacatcagtagtgcactgcaagccaacccatcgttgaccgaattaagcctgtgtacaaatgagctgggtgatgctggagttcatttagtcctgcagggcttgcagtctcctacctgcaagattcgtaaactgtccctccagaactgttgtctgacgaagactggttgcggtgtattaccggacatgcttcgttcaatgcccaccctgcgcgaactgtatctgaatgataacccgttgggcgatgcgggcctccagctgctttgctccgggctgttagacccgcaatgtcacctggagaaactgcaggtcgaatactgcaatctcacagcagcctcgtgcgaaagcttggcgagcgctctgcgtgccaaacgccattttaaagaattagcggtttcgaacaacgaactgggtgaagcaggcgtgcgcgtactttgtcgtgggctggtggatagtgcgtgccaactggaggttctgaaactggaaaattgtggattgacctctgcctcctgcgaggatctttgtggtgtggtcgctagcaaaccaagcctccaggaattggaccttggcgataacaaattaggtgaccaaggcatcgcaacgttatgcccgcgcctgcttcacccttcatgccagattcgtgttttgtggctctgggattgtgatatcaccaccgccggctgccgcgacctctgtcgtgtattacgcgcgaaggaatccctcaaagagatgagtcttgcgggtaatgccttgggagatgaaggcgcacgtctcttgtgcgaatcgttattagaaccggcgtgccagctccagagcctttgggtgaaaagctgttctttcactgctgcttcatgccagcattttagttcgatgttgacgcgcaacacgtgtcttagggagctccaattgagcaataataaattaggtgattgtggcgtgcagcagctttgccaagggttatctcaaccaggtgccgccctccaggttttgtggttgggcgactgtgatgtagcacatagtggctgtgcaagcttagcttccgtgttgcttgtcaaccgttccttacgcgaactcgaccttagtaacaactgcatgggcgaagaagggattctccgtttgatggagagcgttgaacaaccgggatgcgtgcttgaacagttggtcctctatgacatctactggtcggaggagatggataattctttacgtgccttagaaggtcgcaaaccgtcattgcgcgtgattttc

SEQ ID NO: 58 - protein, 468 aa, synthetic construct
  REGION 1..468: note = Variant of RNase inhibitor
MHHHHHHGGSGTMSLDIQCQQLSDARWTELLPLLQQSEVVRLDDCGLTEMRCKDISSALQANPSLTELSLCTNELGDAGVHLVLQGLQSPTCKIRKLSLQNCCLTKTGCGVLPDMLRSMPTLRELYLNDNPLGDAGLQLLCSGLLDPQCHLEKLQVEYCNLTAASCESLASALRAKRHFKELAVSNNELGEAGVRVLCRGLVDSACQLEVLKLENCGLTSASCEDLCGVVASKPSLQELDLGDNKLGDQGIATLCPRLLHPSCQIRVLWLWDCDITTAGCRDLCRVLRAKESLKEMSLAGNALGDEGARLLCESLLEPACQLQSLWVKSCSFTAASCQHFSSMLTRNTCLRELQLSNNKLGDCGVQQLCQGLSQPGAALQVLWLGDCDVAHSGCASLASVLLVNRSLRELDLSNNCMGEEGILRLMESVEQPGCVLEQLVLYDIYWSEEMDNSLRALEGRKPSLRVIF

SEQ ID NO: 59 - DNA, 1404 bp, synthetic construct
  misc_feature 1..1404: note = Variant of RNase inhibitor
  source 1..1404: mol_type = other DNA
atgcaccatcatcatcatcatggcggtagcggcaccatgtctctggatattcagtgtcagcaattgtcagatgcgcgttggacggaactgttaccgcttctgcaacagagcgaagtggtgcgcctggatgactgcggcctcactgagatgcgctgcaaagacatcagtagtgcactgcaagccaacccatcgttgaccgaattaagcctgtgtacaaatgagctgggtgatgctggagttcatttagtcctgcagggcttgcagtctcctacctgcaagattcgtaaactgtccctccagaactgttgtctgacgaagactggttgcggtgtattaccggacatgcttcgttcaatgcccaccctgcgcgaactgtatctgaatgataacccgttgggcgatgcgggcctccagctgctttgctccgggctgttagacccgcaatgtcacctggagaaactgcaggtcgaatactgcaatctcacagcagcctcgtgcgaaagcttggcgagcgctctgcgtgccaaacgccattttaaagaattagcggtttcgaacaacgaactgggtgaagcaggcgtgcgcgtactttgtcgtgggctggtggatagtgcgtgccaactggaggttctgaaactggaaaattgtggattgacctctgcctcctgcgaggatctttgtggtgtggtcgctagcaaaccaagcctccaggaattggaccttggcgataacaaattaggtgaccaaggcatcgcaacgttatgcccgcgcctgcttcacccttcatgccagattcgtgttttgtggctctgggattgtgatatcaccaccgccggctgccgcgacctctgtcgtgtattacgcgcgaaggaatccctcaaagagatgagtcttgcgggtaatgccttgggagatgaaggcgcacgtctcttgtgcgaatcgttattagaaccggcgtgccagctccagagcctttgggtgaaaagctgttctttcactgctgcttcatgccagcattttagttcgatgttgacgcgcaacaagtgtcttgtcgagctccaattgagcaataataaattaggtgattgtggcgtgcagcagctttgccaagggttatctcaaccaggtgccgccctccaggttttgtggttgggcgactgtgatgtagcacatagtggctgtgcaagcttagcttccgtgttgcttgtcaaccgttccttacgcgaactcgaccttagtaacaactgcatgggcgaagaagggattctccgtttgatggagagcgttgaacaaccgggatgcgtgcttgaacagttggtcctctatgacatctactggtcggaggagatggataattctttacgtgccttagaaggtcgcaaaccgtcattgcgcgtgattttc

SEQ ID NO: 60 - protein, 468 aa, synthetic construct
  REGION 1..468: note = Variant of RNase inhibitor
MHHHHHHGGSGTMSLDIQCQQLSDARWTELLPLLQQSEVVRLDDCGLTEMRCKDISSALQANPSLTELSLCTNELGDAGVHLVLQGLQSPTCKIRKLSLQNCCLTKTGCGVLPDMLRSMPTLRELYLNDNPLGDAGLQLLCSGLLDPQCHLEKLQVEYCNLTAASCESLASALRAKRHFKELAVSNNELGEAGVRVLCRGLVDSACQLEVLKLENCGLTSASCEDLCGVVASKPSLQELDLGDNKLGDQGIATLCPRLLHPSCQIRVLWLWDCDITTAGCRDLCRVLRAKESLKEMSLAGNALGDEGARLLCESLLEPACQLQSLWVKSCSFTAASCQHFSSMLTRNKCLVELQLSNNKLGDCGVQQLCQGLSQPGAALQVLWLGDCDVAHSGCASLASVLLVNRSLRELDLSNNCMGEEGILRLMESVEQPGCVLEQLVLYDIYWSEEMDNSLRALEGRKPSLRVIF

SEQ ID NO: 61 - DNA, 1404 bp, synthetic construct
  misc_feature 1..1404: note = Variant of RNase inhibitor
  source 1..1404: mol_type = other DNA
atgcaccatcatcatcatcatggcggtagcggcaccatgtctctggatattcagtgtcagcaattgtcagatgcgcgttggacggaactgttaccgcttctgcaacagagcgaagtggtgcgcctggatgactgcggcctcactgagatgcgctgcaaagacatcagtagtgcactgcaagccaacccatcgttgaccgaattaagcctgtgtacaaatgagctgggtgatgctggagttcatttagtcctgcagggcttgcagtctcctacctgcaagattcgtaaactgtccctccagaactgttgtctgacgaagactggttgcggtgtattaccggacatgcttcgttcaatgcccaccctgcgcgaactgtatctgaatgataacccgttgggcgatgcgggcctccagctgctttgctccgggctgttagacccgcaatgtcacctggagaaactgcaggtcgaatactgcaatctcacagcagcctcgtgcgaaagcttggcgagcgctctgcgtgccaaacgccattttaaagaattagcggtttcgaacaacgaactgggtgaagcaggcgtgcgcgtactttgtcgtgggctggtggatagtgcgtgccaactggaggttctgaaactggaaaattgtggattgacctctgcctcctgcgaggatctttgtggtgtggtcgctagcaaaccaagcctccaggaattggaccttggcgataacaaattaggtgaccaaggcatcgcaacgttatgcccgcgcctgcttcacccttcatgccagattcgtgttttgtggctctgggattgtgatatcaccaccgccggctgccgcgacctctgtcgtgtattacgcgcgaaggaatccctcaaagagatgagtcttgcgggtaatgccttgggagatgaaggcgcacgtctcttgtgcgaatcgttattagaaccggcgtgccagctccagagcctttgggtgaaaagctgttctttcactgctgcttcatgccagcattttagttcgatgttgacgcgcaacacgtgtcttgtcgagctccaattgagcaataataaattaggtgatgagggcgtgcagcagctttgccaagggttatctcaaccaggtgccgccctccaggttttgtggttgggcgactgtgatgtagcacatagtggctgtgcaagcttagcttccgtgttgcttgtcaaccgttccttacgcgaactcgaccttagtaacaactgcatgggcgaagaagggattctccgtttgatggagagcgttgaacaaccgggatgcgtgcttgaacagttggtcctctatgacatctactggtcggaggagatggataattctttacgtgccttagaaggtcgcaaaccgtcattgcgcgtgattttc

SEQ ID NO: 62 - protein, 468 aa, synthetic construct
  REGION 1..468: note = Variant of RNase inhibitor
MHHHHHHGGSGTMSLDIQCQQLSDARWTELLPLLQQSEVVRLDDCGLTEMRCKDISSALQANPSLTELSLCTNELGDAGVHLVLQGLQSPTCKIRKLSLQNCCLTKTGCGVLPDMLRSMPTLRELYLNDNPLGDAGLQLLCSGLLDPQCHLEKLQVEYCNLTAASCESLASALRAKRHFKELAVSNNELGEAGVRVLCRGLVDSACQLEVLKLENCGLTSASCEDLCGVVASKPSLQELDLGDNKLGDQGIATLCPRLLHPSCQIRVLWLWDCDITTAGCRDLCRVLRAKESLKEMSLAGNALGDEGARLLCESLLEPACQLQSLWVKSCSFTAASCQHFSSMLTRNTCLVELQLSNNKLGDEGVQQLCQGLSQPGAALQVLWLGDCDVAHSGCASLASVLLVNRSLRELDLSNNCMGEEGILRLMESVEQPGCVLEQLVLYDIYWSEEMDNSLRALEGRKPSLRVIF

SEQ ID NO: 63 - DNA, 1404 bp, synthetic construct
  misc_feature 1..1404: note = Variant of RNase inhibitor
  source 1..1404: mol_type = other DNA
atgcaccatcatcatcatcatggcggtagcggcaccatgtctctggatattcagtgtcagcaattgtcagatgcgcgttggacggaactgttaccgcttctgcaacagagcgaagtggtgcgcctggatgactgcggcctcactgagatgcgctgcaaagacatcagtagtgcactgcaagccaacccatcgttgaccgaattaagcctgtgtacaaatgagctgggtgatgctggagttcatttagtcctgcagggcttgcagtctcctacctgcaagattcgtaaactgtccctccagaactgttgtctgacgaagactggttgcggtgtattaccggacatgcttcgttcaatgcccaccctgcgcgaactgtatctgaatgataacccgttgggcgatgcgggcctccagctgctttgctccgggctgttagacccgcaatgtcacctggagaaactgcaggtcgaatactgcaatctcacagcagcctcgtgcgaaagcttggcgagcgctctgcgtgccaaacgccattttaaagaattagcggtttcgaacaacgaactgggtgaagcaggcgtgcgcgtactttgtcgtgggctggtggatagtgcgtgccaactggaggttctgaaactggaaaattgtggattgacctctgcctcctgcgaggatctttgtggtgtggtcgctagcaaaccaagcctccaggaattggaccttggcgataacaaattaggtgaccaaggcatcgcaacgttatgcccgcgcctgcttcacccttcatgccagattcgtgttttgtggctctgggattgtgatatcaccaccgccggctgccgcgacctctgtcgtgtattacgcgcgaaggaatccctcaaagagatgagtcttgcgggtaatgccttgggagatgaaggcgcacgtctcttgtgcgaatcgttattagaaccggcgtgccagctccagagcctttgggtgaaaagctgttctttcactgctgcttcatgccagcattttagttcgatgttgacgcgcaacacgtgtcttgtcgagctccaattgagcaataataaattaggtgattgtggcgtgcagcagctttgccaagggttatctcaaccaggtgccgccctccaggttttgtggttgggcgactgtgatgtagcacatagtggctgtgcaagcttagcttccgtgttgcttgtcaaccgttccttacgcgaactcgaccttagtaacaactgcatgggcgaagaagggattctccgtttgatggagagcgttgaacaaccgggatgcgtgcttgaacagttggtcctctatgacatctactggtcggaggagatggataatcggttacgtgccttagaaggtcgcaaaccgtcattgcgcgtgattttc

SEQ ID NO: 64 - protein, 468 aa, synthetic construct
  REGION 1..468: note = Variant of RNase inhibitor
MHHHHHHGGSGTMSLDIQCQQLSDARWTELLPLLQQSEVVRLDDCGLTEMRCKDISSALQANPSLTELSLCTNELGDAGVHLVLQGLQSPTCKIRKLSLQNCCLTKTGCGVLPDMLRSMPTLRELYLNDNPLGDAGLQLLCSGLLDPQCHLEKLQVEYCNLTAASCESLASALRAKRHFKELAVSNNELGEAGVRVLCRGLVDSACQLEVLKLENCGLTSASCEDLCGVVASKPSLQELDLGDNKLGDQGIATLCPRLLHPSCQIRVLWLWDCDITTAGCRDLCRVLRAKESLKEMSLAGNALGDEGARLLCESLLEPACQLQSLWVKSCSFTAASCQHFSSMLTRNTCLVELQLSNNKLGDCGVQQLCQGLSQPGAALQVLWLGDCDVAHSGCASLASVLLVNRSLRELDLSNNCMGEEGILRLMESVEQPGCVLEQLVLYDIYWSEEMDNRLRALEGRKPSLRVIF

SEQ ID NO: 65 - DNA, 1404 bp, synthetic construct
  misc_feature 1..1404: note = Variant of RNase inhibitor
  source 1..1404: mol_type = other DNA
atgcaccatcatcatcatcatggcggtagcggcaccatgtctctggatattcagtgtcaacaattgtcagatgcgcgttggacggaactgttaccgcttctgcaacagagcgaagtggtgcgcctggatgactgcggcctcactgagatgcgctgcaaagacatcagtagtgcactgcaagccaacccatcgttgaccgaattaagcctgtgtacaaatgagctgggtgatgctggagttcatttagtcctgcagggcttgcagtctcctacctgcaagattgaaaaactgtccctccagaactgttgtctgacgaagactggttgcggtgtattaccggacatgcttcgttcaatgcccaccctgcgcgaactgtatctgaatgataacccgttgggcgatgcgggcctccagctgctttgctccgggctgttagacccgcaatgtcacctggagaaactgcaggtggaatactgcaatctcacagcagcctcgtgcgaaagcttggcgagcgctctgcgtgccaaacgccattttaaagaattagcggtttcgaacaacgaactgggtgaagcaggcgtgcgcgtactttgtcgtgggctggtggatagtgcgtgccaactggaggttctgaaactggaaaattgtggattgacctctgcctcctgcgaggatctttgtggtgtggtcgctagcaaaccaagcctccaggaattggaccttggcgataacaaattaggtgaccaaggcatcgcaacgttatgcccgtttctgcttcacccttcatgccagattcgtgttttgtggctctgggattgtgatatcaccaccgccggctgccgcgacctctgtcgtgtattacgcgcgaaggaatccctcaaagagattagtcttgcgggtaatgccttgggagatgaaggcgcacgtctcttgtgcgaatcgttattagaaccggcgtgccagctccagagcctttgggtgaaaagctgttctttcactgctgcttcatgccagcattttagttcgatgttgacgcgcaacacgtgtcttgtcgagctccaattgagcaataataaattaggtgattgtggcgtgcagcagctttgccaagggttatctcaaccaggtgccgccctccaggttttgtggttgggcgactgtgatgtagcacatagtggctgtgcaagcttagcttccgtgttgcttgtcaaccgttccttacgcgaactcgaccttagtaacaactgcatgggcgaggaaggggttctccgtttgatggagagcgttgaacaaccgggatgcgtgcttgaacagttggtcctctatgacatctactggtcggaggagatggataattctttacgtgccttagaagggcgcaaaccgtcattgcgcgtgattttc

SEQ ID NO: 66 - protein, 468 aa, synthetic construct
  REGION 1..468: note = Variant of RNase inhibitor
MHHHHHHGGSGTMSLDIQCQQLSDARWTELLPLLQQSEVVRLDDCGLTEMRCKDISSALQANPSLTELSLCTNELGDAGVHLVLQGLQSPTCKIEKLSLQNCCLTKTGCGVLPDMLRSMPTLRELYLNDNPLGDAGLQLLCSGLLDPQCHLEKLQVEYCNLTAASCESLASALRAKRHFKELAVSNNELGEAGVRVLCRGLVDSACQLEVLKLENCGLTSASCEDLCGVVASKPSLQELDLGDNKLGDQGIATLCPFLLHPSCQIRVLWLWDCDITTAGCRDLCRVLRAKESLKEISLAGNALGDEGARLLCESLLEPACQLQSLWVKSCSFTAASCQHFSSMLTRNTCLVELQLSNNKLGDCGVQQLCQGLSQPGAALQVLWLGDCDVAHSGCASLASVLLVNRSLRELDLSNNCMGEEGVLRLMESVEQPGCVLEQLVLYDIYWSEEMDNSLRALEGRKPSLRVIF

SEQ ID NO: 67 - DNA, 1404 bp, synthetic construct
  misc_feature 1..1404: note = Variant of RNase inhibitor
  source 1..1404: mol_type = other DNA
atgcaccatcatcatcatcatggcggtagcggcaccatgtctctggatattcagtgtcagcaattgtcagatgcgcgttggacggaactgttaccgcttctgcaacagagcgaagtggtgcgcctggatgactgcggcctcactgagatgcgctgcaaagacatcagtagtgcactgcaagccaacccatcgttgaccgaattaagcctgtgtacaaatgagctgggtgatgctggagttcatttagtcctgcagggcttgcagtctcctacctgcaagattcgtaaactgtccctccagaactgttgtctgacgaagactggttgcggtgtattaccggacatgcttcgttcaatgcccaccctgcgcgaactgtatctgaatgataacccgttgggcgatgcgggcctccagctgctttgctccgggctgttagacccgcaatgtcacctggagaaactgcaggtcgaatactgcaatctcacagcagcctcgtgcgaaagcttggcgagcgctctgcgtgccaaacgccattttaaagaattagcggtttcgaacaacgaactgggtgaagcaggcgtgcgcgtactttgtcgtgggctggtggatagtgcgtgccaactggaggttctgaaactggaaaattgtggattgacctctgcctcctgcgaggatctttgtggtgtggtcgctagcaaaccaagcctccaggaattggaccttggcgataacaaattaggtgaccaaggcatcgcaacgttatgcccgcgcctgcttcacccttcatgccagattcgtgttttgtggctctgggattgtgatatcaccaccgccggctgccgcgacctctgtcgtgtattacgcgcgaaggaatccctcaaagagatgagtcttgcgggtaatgccttgggagatgaaggcgcacgtctcttgtgcgaatcgttattagaaccggcgtgccagctccagagcctttgggtgaaaagctgttctttcactgctgcttcatgccagcattttagttcgatgttgacgcgcaacacgtgtcttgtcgagctccaattgagcaataataaattaggtgattgtggcgtgcagcagctttgccaagggttatctcaaccaggtgccgccctccaggttttgtggttgggcgactgtgatgtagcacatagtggctgttgtagcttagcttccgtgttgcttgtcaaccgttccttacgcgaactcgaccttagtaacaactgcatgggcgaagaagggattctccgtttgatggagagcgttgaacaaccgggatgcgtgcttgaacagttggtcctctatgacatctactggtcggaggagatggataattctttacgtgccttagaaggtcgcaaaccgtcattgcgcgtgattttc

SEQ ID NO: 68 - protein, 468 aa, synthetic construct
  REGION 1..468: note = Variant of RNase inhibitor
MHHHHHHGGSGTMSLDIQCQQLSDARWTELLPLLQQSEVVRLDDCGLTEMRCKDISSALQANPSLTELSLCTNELGDAGVHLVLQGLQSPTCKIRKLSLQNCCLTKTGCGVLPDMLRSMPTLRELYLNDNPLGDAGLQLLCSGLLDPQCHLEKLQVEYCNLTAASCESLASALRAKRHFKELAVSNNELGEAGVRVLCRGLVDSACQLEVLKLENCGLTSASCEDLCGVVASKPSLQELDLGDNKLGDQGIATLCPRLLHPSCQIRVLWLWDCDITTAGCRDLCRVLRAKESLKEMSLAGNALGDEGARLLCESLLEPACQLQSLWVKSCSFTAASCQHFSSMLTRNTCLVELQLSNNKLGDCGVQQLCQGLSQPGAALQVLWLGDCDVAHSGCCSLASVLLVNRSLRELDLSNNCMGEEGILRLMESVEQPGCVLEQLVLYDIYWSEEMDNSLRALEGRKPSLRVIF

SEQ ID NO: 69 - DNA, 1404 bp, synthetic construct
  misc_feature 1..1404: note = Variant of RNase inhibitor
  source 1..1404: mol_type = other DNA
atgcaccatcatcatcatcatggcggtagcggcaccatgtctctggatattcagtgtcagcaattgtcagatgcgcgttggacggaactgttaccgcttctgcaacagagcgaagtggtgcgcctggatgactgcggcctcactgagatgcgctgcaaagacatcagtagtgcactgcaagccaacccatcgttgaccgaattaagcctgtgtacaaatgagctgggtgatgctggagttcatttagtcctgcagggcttgcagtctcctacctgcaagctgcgtaaactgtccctccagaactgttgtctgacgaagactggttgcggtgtattaccggacatgcttcgttcaatgccctcgctgcgcgaactgtatctgaatgataacccgttgggcgatgcgggcctccagctgctttgctccgggctgttagacccgcaatgtcacctggagaaactgcaggtcgaatactgcaatctcacagcagcctcgtgcgaaagcttggcgagcgctctgcgtgccaaacgccattttaaagaattagcggtttcgaacaacgaactgggtgaagcaggcgtgcgcgtactttgtcgtgggctggtggatagtgcgtgccaactggaggttctgaaactggaaaattgtggattgacctctgcctcctgcgaggatctttgtggtgtggtcgctagcaaaccaagcctccaggaattggaccttggcgataacaaattaggtgaccaaggcatcgcaacgttatgcccgcgcctgcttcacccttcatgccagattcgtgttttgtggctctgggattgtgatatcaccaccgccggctgccgcgacctctgtcgtgtattacgcgcgaaggaatccctcaaagagatgagtcttgcgggtaatgccttgggagatgaaggcgcacgtctcttgtgcgaatcgttattagaaccggcgtgccagctccagagcctttgggtgaaaagctgttctctgactgctgcttcatgccagcattttagttcgatgttgacgcgcaacacgtgtcttgtcgagctccaattgagcaataataaattaggtgattgtggcgtgcagcagctttgccaagggttatctcaaccaggtgccgccctccaggttttgtggttgggcgactgtgatgtaacgcatagtggctgtgcaagcttagcttccgtgttgcttgtcaaccgttccttacgcgaactcgaccttagtaacaactgcatgggcgaagaagggattctccgtttgatggagagcgttgaacaaccgggatgcgtgcttgaacagttggtcctctatgacatctactggtcggaggagatggataattctttacgtgccttagaaggtcgcaaaccgtcattgcgcatcattttc

SEQ ID NO: 70 - protein, 468 aa, synthetic construct
  REGION 1..468: note = Variant of RNase inhibitor
MHHHHHHGGSGTMSLDIQCQQLSDARWTELLPLLQQSEVVRLDDCGLTEMRCKDISSALQANPSLTELSLCTNELGDAGVHLVLQGLQSPTCKLRKLSLQNCCLTKTGCGVLPDMLRSMPSLRELYLNDNPLGDAGLQLLCSGLLDPQCHLEKLQVEYCNLTAASCESLASALRAKRHFKELAVSNNELGEAGVRVLCRGLVDSACQLEVLKLENCGLTSASCEDLCGVVASKPSLQELDLGDNKLGDQGIATLCPRLLHPSCQIRVLWLWDCDITTAGCRDLCRVLRAKESLKEMSLAGNALGDEGARLLCESLLEPACQLQSLWVKSCSLTAASCQHFSSMLTRNTCLVELQLSNNKLGDCGVQQLCQGLSQPGAALQVLWLGDCDVTHSGCASLASVLLVNRSLRELDLSNNCMGEEGILRLMESVEQPGCVLEQLVLYDIYWSEEMDNSLRALEGRKPSLRIIF

SEQ ID NO: 71 - DNA, 1404 bp, synthetic construct
  misc_feature 1..1404: note = Variant of RNase inhibitor
  source 1..1404: mol_type = other DNA
atgcaccatcatcatcatcatggcggtagcggcaccatgtctctggatattcagtgtcagcaattgtcagatgcgcgttggacggaactgttaccgcttctgcaacagagcgaagtggtgcgcctggatgactgcggcctcactgagatgcgctgcaaagacatcagtagtgcactgcaagccaacccatcgttgaccgaattaagcctgtgtacaaatgagctgggtgatgctggagttcatttagtcctgcagggcttgcagtctcctacctgcaagattcgcaaactgtccctccagaactgttgtctgacgaagactggttgcggtgtattaccggacatgcttcgttcaatgcccaccctgcgcgaactgtatctgaatgataacccgttgggcgatgcgggcctccagctgctttgctccgggctgttagacccgcaatgtcacctggagaaactgcaggtggaatactgcaatctcacagcagcctcgtgcgaaagcttggcgagcgctctgcgtgccaaacgccattttaaagaattagcggtttcgaacaacgaactgggtgaagcaggcgtgcgcgtactttgtcgtgggctggtggatagtgcgtgccaactggaggttctgaaactggaaaattgtggattgacctctgcctcctgcgaggatctttgtggtgtggtcgctagcaaaccaagcctccaggaattggaccttggcgataacaaattaggtgaccaaggcatcgcaacgttatgcccgggtctgcttcacccttcatgccagattcgtgttttgtggctctgggattgtgatatcaccaccgccggctgccgcgacctctgtcgtgtattacgcgcgaaggaatccctcaaagagatgagtcttgcgggtaatgccttgggagatgaaggcgcacgtctcttgtgcgaatcgttattagaaccggcgtgccagctccagagcctttgggtgaaaagctgttctttcactgctgcttcatgccagcattttagttcgatgttgacgcgcaacacgtgtcttgtcgagctccaattgagcaataataaattaggtgattgtggcgtgcagcagctttgccaagggttatctcaaccaggtgccgccctccaggttttgtggttgggcgactgtgatgtagcacatagtggctgtgcaagcttagcttccgtgttgcttgtcaaccgttccttacgcgaactcgaccttagtaacaactgcctgggcgatgaagggattctccgtttgatggagagcgttgaacaaccgggatgcgtgcttgaacagttggtcctctatgacatctactggtcggaggagatggataattctttacgtgccttagaagagcgcaaaccgtcattgcgcgtgattttc

SEQ ID NO: 72 - protein, 468 aa, synthetic construct
  REGION 1..468: note = Variant of RNase inhibitor
MHHHHHHGGSGTMSLDIQCQQLSDARWTELLPLLQQSEVVRLDDCGLTEMRCKDISSALQANPSLTELSLCTNELGDAGVHLVLQGLQSPTCKIRKLSLQNCCLTKTGCGVLPDMLRSMPTLRELYLNDNPLGDAGLQLLCSGLLDPQCHLEKLQVEYCNLTAASCESLASALRAKRHFKELAVSNNELGEAGVRVLCRGLVDSACQLEVLKLENCGLTSASCEDLCGVVASKPSLQELDLGDNKLGDQGIATLCPGLLHPSCQIRVLWLWDCDITTAGCRDLCRVLRAKESLKEMSLAGNALGDEGARLLCESLLEPACQLQSLWVKSCSFTAASCQHFSSMLTRNTCLVELQLSNNKLGDCGVQQLCQGLSQPGAALQVLWLGDCDVAHSGCASLASVLLVNRSLRELDLSNNCLGDEGILRLMESVEQPGCVLEQLVLYDIYWSEEMDNSLRALEERKPSLRVIF

SEQ ID NO: 73 - DNA, 1404 bp, synthetic construct
  misc_feature 1..1404: note = Variant of RNase inhibitor
  source 1..1404: mol_type = other DNA
atgcaccatcatcatcatcatggcggtagcggcaccatgtctctggatattcagtgtcagcaattgtcagatgcgcgttggacggaactgttaccgcttctgcaacagagcgaagtggtgcgcctggatgactgcggcctcactgagatgcgctgcaaagacatcagtagtgcactgcaagccaacccatcgttgaccgaattaagcctgtgtacaaatgagctgggtgatgctggagttcatttagtcctgcagggcttgcagtctcctacctgcaagattcgtaaactgtccctccagaactgttgtctgacgaagactggttgcggtgtattaccggacatgcttcgttcaatgcccaccctgcgcgaactgtatctgaatgataacccgttgggcgatgcgggcctccagctgctttgctccgggctgttagacccgcaatgtcacctggagaaactgcaggtcgaatactgcaatctcacagcagcctcgtgcgaaagcttggcgagcgctctgcgtgccaaacgccattttaaagaattagcggtttcgaacaacgaactgggtgaagcaggcgtgcgcgtactttgtcgtgggctggtggatagtgcgtgccaactggaggttctgaaactggaaaattgtggattgacctctgcctcctgcgaggatctttgtggtgtggtcgctagcaaaccaagcctccaggaattggaccttggcgataacaaattaggtgaccaaggcatcgcaacgttatgcccgcgcctgcttcacccttcatgccagattcgtgttttgtggctctgggattgtgatatcaccaccgccggctgccgcgacctctgtcgtgtattacgcgcgaaggaatccctcaaagagatgagtcttgcgggtaatgccttgggagatgaaggcgcacgtctcttgtgcgaatcgttattagaaccggcgtgccagctccagagcctttgggtgaaaagctgttctttcactgctgcttcatgccagcattttagttcgatgttgacgcgcaacacgtgtcttgtcgagctccaattgagcaataataaattaggtgattgtggcgtgcagcagctttgccaagggttatctcaaccaggtgccgccctccaggttttgtggttgggcgactgtgatgtagcacatagtggctgtgcaagcttagcttccgtgttgcttgtcaaccgttccttacgcgaactcgaccttagtaacaactgcatgggcgaagaagggattctccgtttgatggagagcgttgaacaaccgggatgcgtgcttgaacagttggtcctctatgacatctactggtcggaggagatggatcgttctttacgtgccttagaaggtcgcaaaccgtcattgcgcgtgattttc

SEQ ID NO: 74 - protein, 468 aa, synthetic construct
  REGION 1..468: note = Variant of RNase inhibitor
MHHHHHHGGSGTMSLDIQCQQLSDARWTELLPLLQQSEVVRLDDCGLTEMRCKDISSALQANPSLTELSLCTNELGDAGVHLVLQGLQSPTCKIRKLSLQNCCLTKTGCGVLPDMLRSMPTLRELYLNDNPLGDAGLQLLCSGLLDPQCHLEKLQVEYCNLTAASCESLASALRAKRHFKELAVSNNELGEAGVRVLCRGLVDSACQLEVLKLENCGLTSASCEDLCGVVASKPSLQELDLGDNKLGDQGIATLCPRLLHPSCQIRVLWLWDCDITTAGCRDLCRVLRAKESLKEMSLAGNALGDEGARLLCESLLEPACQLQSLWVKSCSFTAASCQHFSSMLTRNTCLVELQLSNNKLGDCGVQQLCQGLSQPGAALQVLWLGDCDVAHSGCASLASVLLVNRSLRELDLSNNCMGEEGILRLMESVEQPGCVLEQLVLYDIYWSEEMDRSLRALEGRKPSLRVIF

SEQ ID NO: 75 - DNA, 1404 bp, synthetic construct
  misc_feature 1..1404: note = Variant of RNase inhibitor
  source 1..1404: mol_type = other DNA
atgcaccatcatcatcatcatggcggtagcggcaccatgtctctggatattcagtgtcaacaattgtcagatgcgcgttggacggaactgttaccgcttctgcaacagagcgaagtggtgcgcctggatgactgcggcctcactgagatgcgctgcaaagacatcagtagtgcactgcaagccaacccatcgttgaccgaattaagcctgtgtacaaatgagctgggtgatgctggagttcatttagtcctgcagggcttgcagtctcctacctgcaagattgaaaaactgtccctccagaactgttgtctgacgaagactggttgcggtgtattaccggacatgcttcgttcaatgcccaccctgcgcgaactgtatctgaatgataacccgttgggcgatgcgggcctccagctgctttgctccgggctgttagacccgcaatgtcacctggagaaactgcaggtcgaatactgcaatctcacagcagcctcgtgcgaaagcttggcgagcgctctgcgtgccaaacgccattttaaagaattagcggtttcgaacaacgaactgggtgaagcaggcgtgcgcgtactttgtcgtgggctggtggatagtgcgtgccaactggaggttctgaaactggaaaattgtggattgacctctgcctcctgcgaggatctttgtggtgtggtcgctagcaaaccaagcctccaggaattggaccttggcgataacaaattaggtgaccaaggcatcgcaacgttatgcccgtttctgcttcacccttcatgccagattcgtgttttgtggctctgggattgtgatatcaccaccgccggctgccgcgacctctgtcgtgtattacgcgcgaaggaatccctcaaagagattagtcttgcgggtaatgccttgggagatgaaggcgcacgtctcttgtgcgaatcgttattagaaccggcgtgccagctccagagcctttgggtgaaaagctgttctttcactgctgcttcatgccagcattttagttcgatgttgacgcgcaacacgtgtcttgtcgagctccaattgagcaataataaattaggtgattgtggcgtgcagcagctttgccaagggttatctcaaccaggtgccgccctccaggttttgtggttgggcgactgtgatgtagcacatagtggctgtgcaagcttagcttccgtgttgcttgtcaaccgttccttacgcgaactcgaccttagtaacaactgcatgggcgaagaagggattctccgtttgatggagagcgttgaacaaccgggatgcgtgcttgaacagttggtcctctatgacatctactggtcggaggagatggataattctttacgtgccttagaagggcgcaaaccgtcattgcgcgtgattttc

SEQ ID NO: 76 - protein, 468 aa, synthetic construct
  REGION 1..468: note = Variant of RNase inhibitor
MHHHHHHGGSGTMSLDIQCQQLSDARWTELLPLLQQSEVVRLDDCGLTEMRCKDISSALQANPSLTELSLCTNELGDAGVHLVLQGLQSPTCKIEKLSLQNCCLTKTGCGVLPDMLRSMPTLRELYLNDNPLGDAGLQLLCSGLLDPQCHLEKLQVEYCNLTAASCESLASALRAKRHFKELAVSNNELGEAGVRVLCRGLVDSACQLEVLKLENCGLTSASCEDLCGVVASKPSLQELDLGDNKLGDQGIATLCPFLLHPSCQIRVLWLWDCDITTAGCRDLCRVLRAKESLKEISLAGNALGDEGARLLCESLLEPACQLQSLWVKSCSFTAASCQHFSSMLTRNTCLVELQLSNNKLGDCGVQQLCQGLSQPGAALQVLWLGDCDVAHSGCASLASVLLVNRSLRELDLSNNCMGEEGILRLMESVEQPGCVLEQLVLYDIYWSEEMDNSLRALEGRKPSLRVIF

SEQ ID NO: 77 - DNA, 1404 bp, synthetic construct
  misc_feature 1..1404: note = Variant of RNase inhibitor
  source 1..1404: mol_type = other DNA
atgcaccatcatcatcatcatggcggtagcggcaccatgtctctggatattcagtgtcagcaattgtcagatgcgcgttggacggaactgttaccgcttctgcaacagagcgaagtggtgcgcctggatgactgcggcctcactgagatgcgctgcaaagacatcagtagtgcactgcaagccaacccatcgttgaccgaattaagcctgtgtacaaatgagctgggtgatgctggagttcatttagtcctgcagggcttgcagtctcctacctgcaagattcgtaaactgtccctccagaactgttgtctgacgaagactggttgcggtgtattaccggacatgcttcgttcaatgcccaccctgcgcgaactgtatctgaatgataacccgttgggcgatgcgggcctccagctgctttgctccgggctgttagacccgcaatgtcacctggagaaactgcaggtcgaatactgcaatctcacagcagcctcgtgcgaaagcttggcgagcgctctgcgtgccaaacgccattttaaagaattagcggtttcgaacaacgaactgggtgaagcaggcgtgcgcgtactttgtcgtgggctggtggatagtgcgtgccaactggaggttctgaaactggaaaattgtggattgacctctgcctcctgcgaggatctttgtggtgtggtcgctagcaaaccaagcctccaggaattggaccttggcgataacaaattaggtgaccaaggcatcgcaacgttatgcccgcgcctgcttcacccttcatgccagattcgtgttttgtggctctgggattgtgatatcaccaccgccggctgccgcgacctctgtcgtgtattacgcgcgaaggaatccctcaaagagatgagtcttgcgggtaatgccttgggagatgaaggcgcacgtctcttgtgcgaatcgttattagaaccggcgtgccagctccagagcctttgggtgaaaagctgttcttttactgctgcttcatgccagcattttagttcgatgttgacgcgcaacacgtgtcttgtcgagctccaattgagcaataataaattaggtgattgtggcgtgcagcagctttgccaagggttatctcaaccaggttcggccctccaggttttgtggttgggcgactgtgatgtaacgcatagtggctgtgcaagcttagcttccgtgttgcttgtcaaccgttccttacgcgaactcgaccttagtaacaactgcatgggcgaagaagggattctccgtttgatggagagcgttgaacaaccgggatgcgtgcttgaacagttggtcctctatgacatctactggtcggaggagatggataattctttacgtgccttagaaggtcgcaaaccgtcattgcgcgtcattttc

SEQ ID NO: 78 - protein, 468 aa, synthetic construct
  REGION 1..468: note = Variant of RNase inhibitor
MHHHHHHGGSGTMSLDIQCQQLSDARWTELLPLLQQSEVVRLDDCGLTEMRCKDISSALQANPSLTELSLCTNELGDAGVHLVLQGLQSPTCKIRKLSLQNCCLTKTGCGVLPDMLRSMPTLRELYLNDNPLGDAGLQLLCSGLLDPQCHLEKLQVEYCNLTAASCESLASALRAKRHFKELAVSNNELGEAGVRVLCRGLVDSACQLEVLKLENCGLTSASCEDLCGVVASKPSLQELDLGDNKLGDQGIATLCPRLLHPSCQIRVLWLWDCDITTAGCRDLCRVLRAKESLKEMSLAGNALGDEGARLLCESLLEPACQLQSLWVKSCSFTAASCQHFSSMLTRNTCLVELQLSNNKLGDCGVQQLCQGLSQPGSALQVLWLGDCDVTHSGCASLASVLLVNRSLRELDLSNNCMGEEGILRLMESVEQPGCVLEQLVLYDIYWSEEMDNSLRALEGRKPSLRVIF

SEQ ID NO: 79 - DNA, 1404 bp, synthetic construct
  misc_feature 1..1404: note = Variant of RNase inhibitor
  source 1..1404: mol_type = other DNA
atgcaccatcatcatcatcatggcggtagcggcaccatgtctctggatattcagtgtcagcaattgtcagatgcgcgttggacggaactgttaccgcttctgcaacagagcgaagtggtgcgcctggatgactgcggcctcactgagatgcgctgcaaagacatcagtagtgcactgcaagccaacccatcgttgaccgaattaagcctgtgtacaaatgagctgggtgatgctggagttcatttagtcctgcagggcttgcagtctcctacctgcaagattcgtaaactgtccctccagaactgttgtctgacgaagactggttgcggtgtattaccggacatgcttcgttcaatgcccaccctgcgcgaactgtatctgaatgataacccgttgggcgatgcgggcctccagctgctttgctccgggctgttagacccgcaatgtcacctggagaaactgcaggtcgaatactgcaatctcacagcagcctcgtgcgaaagcttggcgagcgctctgcgtgccaaacgccattttaaagaattagcggtttcgaacaacgaactgggtgaagcaggcgtgcgcgtactttgtcgtgggctggtggatagtgcgtgccaactggaggttctgaaactggaaaattgtggattgacctctgcctcctgcgaggatctttgtggtgtggtcgctagcaaaccaagcctccaggaattggaccttggcgataacaaattaggtgaccaaggcatcgcaacgttatgcccgcgcctgcttcacccttcatgccagattcgtgttttgtggctctgggattgtgatatcaccaccgccggctgccgcgacctctgtcgtgtattacgcgcgaaggaatccctcaaagagatgagtcttgcgggtaatgccttgggagatgaaggcgcacgtctcttgtgcgaatcgttattagaaccggcgtgccagctccagagcctttgggtgaaaagctgttctttcactgctgcttcatgccagcattttagttcgatgttgacgcgcaacacgtgtcttgtcgagctccaattgagcaataataaattaggtgattgtggcgtgcagcagctttgccaagggttatctcaaccaggtgccgccctccaggttttgtggttgggcgactgtgatgtagcacatagtggctgtgcaagcttagcttccgtgttgcttgtcaaccgttccttacgcgaactcgaccttagtaacaactgcatgggcgaagaagggattctccgtttgatggagagcgttgaacaaccgggatgcgtgcttgaacagttggtcctctatgacatctactggtcggaggagatggataattttttacgtgccttagaaggtcgcaaaccgtcattgcgcgtgattttc

SEQ ID NO: 80 - protein, 468 aa, synthetic construct
  REGION 1..468: note = Variant of RNase inhibitor
MHHHHHHGGSGTMSLDIQCQQLSDARWTELLPLLQQSEVVRLDDCGLTEMRCKDISSALQANPSLTELSLCTNELGDAGVHLVLQGLQSPTCKIRKLSLQNCCLTKTGCGVLPDMLRSMPTLRELYLNDNPLGDAGLQLLCSGLLDPQCHLEKLQVEYCNLTAASCESLASALRAKRHFKELAVSNNELGEAGVRVLCRGLVDSACQLEVLKLENCGLTSASCEDLCGVVASKPSLQELDLGDNKLGDQGIATLCPRLLHPSCQIRVLWLWDCDITTAGCRDLCRVLRAKESLKEMSLAGNALGDEGARLLCESLLEPACQLQSLWVKSCSFTAASCQHFSSMLTRNTCLVELQLSNNKLGDCGVQQLCQGLSQPGAALQVLWLGDCDVAHSGCASLASVLLVNRSLRELDLSNNCMGEEGILRLMESVEQPGCVLEQLVLYDIYWSEEMDNFLRALEGRKPSLRVIF

SEQ ID NO: 81 - DNA, 1404 bp, synthetic construct
  misc_feature 1..1404: note = Variant of RNase inhibitor
  source 1..1404: mol_type = other DNA
atgcaccatcatcatcatcatggcggtagcggcaccatgtctctggatattcagtgtcagcaattgtcagatgcgcgttggacggaactgttaccgcttctgcaacagagcgaagtggtgcgcctggatgactgcggcctcactgagatgcgctgcaaagacatcagtagtgcactgcaagccaacccatcgttgaccgaattaagcctgtgtacaaatgagctgggtgatgctggagttcatttagtcctgcagggcttgcagtctcctacctgcaagattcgtaaactgtccctccagaactgttgtctgacgaagactggttgcggtgtattaccggacatgcttcgttcaatgcccaccctgcgcgaactgtatctgaatgataacccgttgggcgatgcgggcctccagctgctttgctccgggctgttagacccgcaatgtcacctggagaaactgcaggtcgaatactgcaatctcacagcagcctcgtgcgaaagcttggcgagcgctctgcgtgccaaacgccattttaaagaattagcggtttcgaacaacgaactgggtgaagcaggcgtgcgcgtactttgtcgtgggctggtggatagtgcgtgccaactggaggttctgaaactggaaaattgtggattgacctctgcctcctgcgaggatctttgtggtgtggtcgctagcaaaccaagcctccaggaattggaccttggcgataacaaattaggtgaccaaggcatcgcaacgttatgcccgcgcctgcttcacccttcatgccagattcgtgttttgtggctctgggattgtgatatcaccaccgccggctgccgcgacctctgtcgtgtattacgcgcgaaggaatccctcaaagagatgagtcttgcgggtaatgccttgggagatgaaggcgcacgtctcttgtgcgaatcgttattagaaccggcgtgccagctccagagcctttgggtgaaaagctgttctttcactgctgcttcatgccagcattttagttcgatgttgacgcgcaacacgtgtcttgtcgagctccaattgagcaataataaattaggtgattgtggcgtgcagcagctttgccaagggttatctcaaccaggtgccgccctccaggttttgtggttgggcgactgtgatgtagcacatagtggctgtgcaagcttagcttccgtgttgcttgtcaaccgttccttacgcgaactcgaccttagtaacaactgcatgggcgaagaagggattctccgtttgatggagagcgttgaacaaccgggatgcgtgcttgaacagttggtcctctatgacatctactggtcggaggagatggataagtctttacgtgccttagaaggtcgcaaaccgtcattgcgcgtgattttc

SEQ ID NO: 82 - protein, 468 aa, synthetic construct
  REGION 1..468: note = Variant of RNase inhibitor
MHHHHHHGGSGTMSLDIQCQQLSDARWTELLPLLQQSEVVRLDDCGLTEMRCKDISSALQANPSLTELSLCTNELGDAGVHLVLQGLQSPTCKIRKLSLQNCCLTKTGCGVLPDMLRSMPTLRELYLNDNPLGDAGLQLLCSGLLDPQCHLEKLQVEYCNLTAASCESLASALRAKRHFKELAVSNNELGEAGVRVLCRGLVDSACQLEVLKLENCGLTSASCEDLCGVVASKPSLQELDLGDNKLGDQGIATLCPRLLHPSCQIRVLWLWDCDITTAGCRDLCRVLRAKESLKEMSLAGNALGDEGARLLCESLLEPACQLQSLWVKSCSFTAASCQHFSSMLTRNTCLVELQLSNNKLGDCGVQQLCQGLSQPGAALQVLWLGDCDVAHSGCASLASVLLVNRSLRELDLSNNCMGEEGILRLMESVEQPGCVLEQLVLYDIYWSEEMDKSLRALEGRKPSLRVIF

SEQ ID NO: 83 - DNA, 1404 bp, synthetic construct
  misc_feature 1..1404: note = Variant of RNase inhibitor
  source 1..1404: mol_type = other DNA
atgcaccatcatcatcatcatggcggtagcggcaccatgtctctggatattcagtgtcagcaattgtcagatgcgcgttggacggaactgttaccgcttctgcaacagagcgaagtggtgcgcctggatgactgcggcctcactgagatgcgctgcaaagacatcagtagtgcactgcaagccaacccatcgttgaccgaattaagcctgtgtacaaatgagctgggtgatgctggagttcatttagtcctgcagggcttgcagtctcctacctgcaagattcgtaaactgtccctccagaactgttgtctgacgaagactggttgcggtgtattaccggacatgcttcgttcaatgcccaccctgcgcgaactgtatctgaatgataacccgttgggcgatgcgggcctccagctgctttgctccgggctgttagacccgcaatgtcacctggagaaactgcaggtcgaatactgcaatctcacagcagcctcgtgcgaaagcttggcgagcgctctgcgtgccaaacgccattttaaagaattagcggtttcgaacaacgaactgggtgaagcaggcgtgcgcgtactttgtcgtgggctggtggatagtgcgtgccaactggaggttctgaaactggaaaattgtggattgacctctgcctcctgcgaggatctttgtggtgtggtcgctagcaaaccaagcctccaggaattggaccttggcgataacaaattaggtgaccaaggcatcgcaacgttatgcccgcgcctgcttcacccttcatgccagattcgtgttttgtggctctggaattgtgatatcaccaccgccggctgccgcgacctctgtcgtgtattacgcgcgaaggaatccctcaaagagatgagtcttgcgggtaatgccttgggagatgaaggcgcacgtctcttgtgcgaatcgttattagaaccggcgtgccagctccagagcctttgggtgaaaagctgttctttcactgctgcttcatgccagcattttagttcgatgttgacgcgcaacacgtgtcttgtcgagctccaattgagcaataataaattaggtgattgtggcgtgcagcagctttgccaagggttatctcaaccaggtgccgccctccaggttttgtggttgggcgactgtgatgtagcacatagtggctgtgcaagcttagcttccgtgttgcttgtcaaccgttccttacgcgaactcgaccttagtaacaactgcatgggcgaagaagggattctccgtttgatggagagcgttgaacaaccgggatgcgtgcttgaacagttggtcctctatgacatctactggtcggaggagatggataattctttacgtgccttagaaggtcgcaaaccgtcattgcgcgtgattttc

SEQ ID NO: 84 - protein, 468 aa, synthetic construct
  REGION 1..468: note = Variant of RNase inhibitor
MHHHHHHGGSGTMSLDIQCQQLSDARWTELLPLLQQSEVVRLDDCGLTEMRCKDISSALQANPSLTELSLCTNELGDAGVHLVLQGLQSPTCKIRKLSLQNCCLTKTGCGVLPDMLRSMPTLRELYLNDNPLGDAGLQLLCSGLLDPQCHLEKLQVEYCNLTAASCESLASALRAKRHFKELAVSNNELGEAGVRVLCRGLVDSACQLEVLKLENCGLTSASCEDLCGVVASKPSLQELDLGDNKLGDQGIATLCPRLLHPSCQIRVLWLWNCDITTAGCRDLCRVLRAKESLKEMSLAGNALGDEGARLLCESLLEPACQLQSLWVKSCSFTAASCQHFSSMLTRNTCLVELQLSNNKLGDCGVQQLCQGLSQPGAALQVLWLGDCDVAHSGCASLASVLLVNRSLRELDLSNNCMGEEGILRLMESVEQPGCVLEQLVLYDIYWSEEMDNSLRALEGRKPSLRVIF

SEQ ID NO: 85 - DNA, 1404 bp, synthetic construct
  misc_feature 1..1404: note = Variant of RNase inhibitor
  source 1..1404: mol_type = other DNA
atgcaccatcatcatcatcatggcggtagcggcaccatgtctctggatattcagtgtcagcaattgtcagatgcgcgttggacggaactgttaccgcttctgcaacagagcgaagtggtgcgcctggatgactgcggcctcactgagatgcgctgcaaagacatcagtagtgcactgcaagccaacccatcgttgaccgaattaagcctgtgtacaaatgagctgggtgatgctggagttcatttagtcctgcagggcttgcagtctcctacctgcaagattcgtaaactgtccctccagaactgttgtctgacgaagactggttgcggtgtattaccggacatgcttcgttcaatgcccaccctgcgcgaactgtatctgaatgataacccgttgggcgatgcgggcctccagctgctttgctccgggctgttagacccgcaatgtcacctggagaaactgcaggtcgaatactgcaatctcacagcagcctcgtgcgaaagcttggcgagcgctctgcgtgccaaacgccattttaaagaattagcggtttcgaacaacgaactgggtgaagcaggcgtgcgcgtactttgtcgtgggctggtggatagtgcgtgccaactggaggttctgaaactggaaaattgtggattgacctctgcctcctgcgaggatctttgtggtgtggtcgctagcaaaccaagcctccaggaattggaccttggctcgaacaaattaggtgaccaaggcatcgcaacgttatgcccgcgcctgcttcacccttcatgccagattcgtgttttgtggctctgggattgtgatatcaccaccgccggctgccgcgacctctgtcgtgtattacgcgcgaaggaatccctcaaagagatgagtcttgcgggtaatgccttgggagatgaaggcgcacgtctcttgtgcgaatcgttattagaaccggcgtgccagctccagagcctttgggtgaaaagctgttctttcactgctgcttcatgccagcattttagttcgatgttgacgcgcaacacgtgtcttgtcgagctccaattgagcaataataaattaggtgattgtggcgtgcagcagctttgccaagggttatctcaaccaggtgccgccctccaggttttgtggttgggcgactgtgatgtagcacatagtggctgtgcaagcttagcttccgtgttgcttgtcaaccgttccttacgcgaactcgaccttagtaacaactgcatgggcgaagaagggattctccgtttgatggagagcgttgaacaaccgggatgcgtgcttgaacagttggtcctctatgacatctactggtcggaggagatggataattctttacgtgccttagaaggtcgcaaaccgtcattgcgcgtgattttc

SEQ ID NO: 86 - protein, 468 aa, synthetic construct
  REGION 1..468: note = Variant of RNase inhibitor
MHHHHHHGGSGTMSLDIQCQQLSDARWTELLPLLQQSEVVRLDDCGLTEMRCKDISSALQANPSLTELSLCTNELGDAGVHLVLQGLQSPTCKIRKLSLQNCCLTKTGCGVLPDMLRSMPTLRELYLNDNPLGDAGLQLLCSGLLDPQCHLEKLQVEYCNLTAASCESLASALRAKRHFKELAVSNNELGEAGVRVLCRGLVDSACQLEVLKLENCGLTSASCEDLCGVVASKPSLQELDLGSNKLGDQGIATLCPRLLHPSCQIRVLWLWDCDITTAGCRDLCRVLRAKESLKEMSLAGNALGDEGARLLCESLLEPACQLQSLWVKSCSFTAASCQHFSSMLTRNTCLVELQLSNNKLGDCGVQQLCQGLSQPGAALQVLWLGDCDVAHSGCASLASVLLVNRSLRELDLSNNCMGEEGILRLMESVEQPGCVLEQLVLYDIYWSEEMDNSLRALEGRKPSLRVIF

SEQ ID NO: 87 - DNA, 1404 bp, synthetic construct
  misc_feature 1..1404: note = Variant of RNase inhibitor
  source 1..1404: mol_type = other DNA
atgcaccatcatcatcatcatggcggtagcggcaccatgtctctggatattcagtgtcagcaattgtcagatgcgcgttggacggaactgttaccgcttctgcaacagagcgaagtggtgcgcctggatgactgcggcctcactgagatgcgctgcaaagacatcagtagtgcactgcaagccaacccatcgttgaccgaattaagcctgtgtacaaatgagctgggtgatgctggagttcatttagtcctgcagggcttgcagtctcctacctgcaagattcgtaaactgtccctccagaactgttgtctgacgaagactggttgcggtgtattaccggacatgcttcgttcaatgcccaccctgcgcgaactggttctgaatgataacccgttgggcgatgcgggcctccagctgctttgctccgggctgttagacccgcaatgtcacctggagaaactgcaggtcgaatactgcaatctcacagcagcctcgtgcgaaagcttggcgagcgctctgcgtgccaaacgccattttaaagaattagcggtttcgaacaacgaactgggtgaagcaggcgtgcgcgtactttgtcgtgggctggtggatagtgcgtgccaactggaggttctgaaactggaaaattgtggattgacctctgcctcctgcgaggatctttgtggtgtggtcgctagcaaaccaagcctccaggaattggaccttggcgataacaaattaggtgaccaaggcatcgcaacgttatgcccgcgcctgcttcacccttcatgccagattcgtgttttgtggctctgggattgtgatatcaccaccgccggctgccgcgacctctgtcgtgtattacgcgcgaaggaatccctcaaagagatgagtcttgcgggtaatgccttgggagatgaaggcgcacgtctcttgtgcgaatcgttattagaaccggcgtgccagctccagagcctttgggtgaaaagctgttctttcactgctgcttcatgccagcattttagttcgatgttgacgcgcaacacgtgtcttgtcgagctccaattgagcaataataaattaggtgattgtggcgtgcagcagctttgccaagggttatctcaaccaggtgccgccctccaggttttgtggttgggcggctgtgatgtagcacatagtggctgtgcaagcttagcttccgtgttgcttgtcaaccgttccttacgcgaactcgaccttagtaacaactgcatgggcgaagaagggattctccgtttgatggagagcgttgaacaaccgggatgcgtgcttgaacagttggtcctctatgacatctactggtcggaggagatggataattctttacgtgccttagaaggtcgcaaaccgtcattgcgcgtgattttc

SEQ ID NO: 88 - protein, 468 aa, synthetic construct
  REGION 1..468: note = Variant of RNase inhibitor
MHHHHHHGGSGTMSLDIQCQQLSDARWTELLPLLQQSEVVRLDDCGLTEMRCKDISSALQANPSLTELSLCTNELGDAGVHLVLQGLQSPTCKIRKLSLQNCCLTKTGCGVLPDMLRSMPTLRELVLNDNPLGDAGLQLLCSGLLDPQCHLEKLQVEYCNLTAASCESLASALRAKRHFKELAVSNNELGEAGVRVLCRGLVDSACQLEVLKLENCGLTSASCEDLCGVVASKPSLQELDLGDNKLGDQGIATLCPRLLHPSCQIRVLWLWDCDITTAGCRDLCRVLRAKESLKEMSLAGNALGDEGARLLCESLLEPACQLQSLWVKSCSFTAASCQHFSSMLTRNTCLVELQLSNNKLGDCGVQQLCQGLSQPGAALQVLWLGGCDVAHSGCASLASVLLVNRSLRELDLSNNCMGEEGILRLMESVEQPGCVLEQLVLYDIYWSEEMDNSLRALEGRKPSLRVIF

SEQ ID NO: 89 - DNA, 1404 bp, synthetic construct
  misc_feature 1..1404: note = Variant of RNase inhibitor
  source 1..1404: mol_type = other DNA
atgcaccatcatcatcatcatggcggtagcggcaccatgtctctggatattcagtgtcagcaattgtcagatgcgcgttggacggaactgttaccgcttctgcaacagagcgaagtggtgcgcctggatgactgcggcctcactgagatgcgctgcaaagacatcagtagtgcactgcaagccaacccatcgttgaccgaattaagcctgtgtacaaatgagctgggtgatgctggagttcatttagtcctgcagggcttgcagtctcctacctgcaagattcgtaaactgtccctccagaactgttgtctgacgaagactggttgcggtgtattaccggacatgcttcgttcaatgcccaccctgcgcgaactgtatctgaatgataacccgttgggcgatgcgggcctccagctgctttgctccgggctgttagacccgcaatgtcacctggagaaactgcaggtcgaatactgcaatctcacagcagcctcgtgcgaaagcttggcgagcgctctgcgtgccaaacgccattttaaagaattagcggtttcgaacaacgaactgggtgaagcaggcgtgcgcgtactttgtcgtgggctggtggatagtgcgtgccaactggaggttctgaaactggaaaattgtggattgacctctgcctcctgcgaggatctttgtggtgtggtcgctagcaaaccaagcctccaggaattggaccttggcgataacaaattaggtgaccaaggcatcgcaacgttatgcccgcgcctgcttcacccttcatgccagattcgtcatttgtggctctgggattgtgatatcaccaccgccggctgccgcgacctctgtcgtgtattacgcgcgaaggaatccctcaaagagatgagtcttgcgggtaatgccttgggagatgaaggcgcacgtctcttgtgcgaatcgttattagaaccggcgtgccagctccagagcctttgggtgaaaagctgttctttcactgctgcttcatgccagcattttagttcgatgttgacgcgcaacacgtgtcttgtcgagctccaattgagcaataataaattaggtgattgtggcgtgcagcagctttgccaagggttatctcaaccaggtgccgccctccaggttttgtggttgggcgactgtgatgtagcacatagtggctgtgcaagcttagcttccgtgttgcttgtcaaccgttccttacgcgaactcgaccttagtaacaactgcatgggcgaagaagggattctccgtttgatggagagcgttgaacaaccgggatgcgtgcttgaacagttggtcctctatgacatctactggtcggaggagatggataattctttacgtgccttagaaggtcgcaaaccgtcattgcgcgtgattttc

SEQ ID NO: 90 - protein, 468 aa, synthetic construct
  REGION 1..468: note = Variant of RNase inhibitor
MHHHHHHGGSGTMSLDIQCQQLSDARWTELLPLLQQSEVVRLDDCGLTEMRCKDISSALQANPSLTELSLCTNELGDAGVHLVLQGLQSPTCKIRKLSLQNCCLTKTGCGVLPDMLRSMPTLRELYLNDNPLGDAGLQLLCSGLLDPQCHLEKLQVEYCNLTAASCESLASALRAKRHFKELAVSNNELGEAGVRVLCRGLVDSACQLEVLKLENCGLTSASCEDLCGVVASKPSLQELDLGDNKLGDQGIATLCPRLLHPSCQIRHLWLWDCDITTAGCRDLCRVLRAKESLKEMSLAGNALGDEGARLLCESLLEPACQLQSLWVKSCSFTAASCQHFSSMLTRNTCLVELQLSNNKLGDCGVQQLCQGLSQPGAALQVLWLGDCDVAHSGCASLASVLLVNRSLRELDLSNNCMGEEGILRLMESVEQPGCVLEQLVLYDIYWSEEMDNSLRALEGRKPSLRVIF

SEQ ID NO: 91 - DNA, 1404 bp, synthetic construct
  misc_feature 1..1404: note = Variant of RNase inhibitor
  source 1..1404: mol_type = other DNA
atgcaccatcatcatcatcatggcggtagcggcaccatgtctctggatattcagtgtcagcaattgtcagatgcgcgttggacggaactgttaccgcttctgcaacagagcgaagtggtgcgcctggatgactgcggcctcactgagatgcgctgcaaagacatcagtagtgcactgcaagccaacccatcgttgaccgaattaagcctgtgtacaaatgagctgggtgatgctggagttcatttagtcctgcagggcttgcagtctcctacctgcaagattcgtaaactgtccctccagaactgttgtctgacgaagactggttgcggtgtattaccggacatgcttcgttcaatgcccaccctgcgcgaactgtatctgaatgataacccgttgggcgatgcgggcctccagctgctttgctccgggctgttagacccgcaatgtcacctggagaaactgcaggtcgaatactgcaatctcacagcagcctcgtgcgaaagcttggcgagcgctctgcgtgccaaacgccattttaaagaattagcggtttcgaacaacgaactgggtgaagcaggcgtgcgcgtactttgtcgtgggctggtggatagtgcgtgccaactggaggttctgaaactggaaaattgtggattgacctctgcctcctgcgaggatctttgtggtgtggtcgctagcaaaccaagcctccaggaattggaccttggcgataacaaattaggtgaccaaggcatcgcaacgttatgcccgcgcctgcttcacccttcatgccagattcgtgttttgtggctctgggattgtgatatcaccaccgccggctgccgcgacctctgtcgtgtattacgcgcgaaggaatccctcaaagagatgagtcttgcgggtaatgccttgggagatgaaggcgcacgtctcttgtgcgaatcgttattagaaccggcgtgccagctccagagcctttgggtgaaaagctgttctttcactgctgcttcatgccagcattttagttcgatgttgacgcgcaacacgtgtcttgtcgagctccaattgagcaataataaattaggtgattgtggcgtgcagcagctttgccaagggttatctcaaccaggtgccgccctccaggttttgtggttgggcgactgtgatgtagggcatagtggctgtgcaagcttagcttccgtgttgcttgtcaaccgttccttacgcgaactcgaccttagtaacaactgcatgggcgaagaagggattctccgtttgatggagagcgttgaacaaccgggatgcgtgcttgaacagttggtcctctatgacatctactggtcggaggagatggataattctttacgtgccttagaaggtcgcaaaccgtcattgcgcgtgattttc

SEQ ID NO: 92 - protein, 468 aa, synthetic construct
  REGION 1..468: note = Variant of RNase inhibitor
MHHHHHHGGSGTMSLDIQCQQLSDARWTELLPLLQQSEVVRLDDCGLTEMRCKDISSALQANPSLTELSLCTNELGDAGVHLVLQGLQSPTCKIRKLSLQNCCLTKTGCGVLPDMLRSMPTLRELYLNDNPLGDAGLQLLCSGLLDPQCHLEKLQVEYCNLTAASCESLASALRAKRHFKELAVSNNELGEAGVRVLCRGLVDSACQLEVLKLENCGLTSASCEDLCGVVASKPSLQELDLGDNKLGDQGIATLCPRLLHPSCQIRVLWLWDCDITTAGCRDLCRVLRAKESLKEMSLAGNALGDEGARLLCESLLEPACQLQSLWVKSCSFTAASCQHFSSMLTRNTCLVELQLSNNKLGDCGVQQLCQGLSQPGAALQVLWLGDCDVGHSGCASLASVLLVNRSLRELDLSNNCMGEEGILRLMESVEQPGCVLEQLVLYDIYWSEEMDNSLRALEGRKPSLRVIF

SEQ ID NO: 93 - DNA, 1404 bp, synthetic construct
  misc_feature 1..1404: note = Variant of RNase inhibitor
  source 1..1404: mol_type = other DNA
atgcaccatcatcatcatcatggcggtagcggcaccatgtctctggatattcagtgtcagcaattgtcagatgcgcgttggacggaactgttaccgcttctgcaacagagcgaagtggtgcgcctggatgactgcggcctcactgagatgcgctgcaaagacatcagtagtgcactgcaagccaacccatcgttgaccgaattaagcctgtgtacaaatgagctgggtgatgctggagttcatttagtcctgcagggcttgcagtctcctacctgcaagattcgtaaactgtccctccagaactgttgtctgacgaagactggttgcggtgtattaccggacatgcttcgttcaatgcccaccctgcgcgaactgtatctgaatgataacccgttgggcgatgcgggcctccagctgctttgctccgggctgttagacccgcaatgtcacctggagaaactgcaggtcgaatactgcaatctcacagcagcctcgtgcgaaagcttggcgagcgctctgcgtgccaaacgccattttaaagaattagcggtttcgaacaacgaactgggtgaagcaggcgtgcgcgtactttgtcgtgggctggtggatagtgcgtgccaactggaggttctgaaactggaaaattgtggattgacctctgcctcctgcgaggatctttgtggtgtggtcgctagcaaaccaagcctccaggaattggaccttggcgataacaaattaggtgaccaaggcatcgcaacgttatgcccgcgcctgcttcacccttcatgccagattcgtgttttgtggctctgggattgtgatatcaccaccgccggctgccgcgacctctgtcgtgtattacgcgcgaaggaatccctcaaagagatgagtcttgcgggtaatgccttgggagatgaaggcgcacgtctcttgtgcgaatcgttattagaaccggcgtgccagctccagagcctttgggtgaaaagctgttctttcactgctgcttcatgccagcattttagttcgatgttgacgcgcaacacgtgtcttgtcgagctccaattgagcaataataaattaggtgattgtggcgtgcagcagctttgccaagggttatctcaaccaggtgccgccctccaggttttgtggttgggcgactgtgatgtagcacatagtggctgtgcaagcttagcttccgtgttgcttgtcaaccgttccttacgcgaactcgaccttagtaacaactgcatgggcgaagaagggattctccgtttgatggagagcgttttgcaaccgggatgcgtgcttgaacagttggtcctctatgacatctactggtcggaggagatggataattctttacgtgccttagaaggtcgcaaaccgtcattgcgcgtgattttc

SEQ ID NO: 94 - protein, 468 aa, synthetic construct
  REGION 1..468: note = Variant of RNase inhibitor
MHHHHHHGGSGTMSLDIQCQQLSDARWTELLPLLQQSEVVRLDDCGLTEMRCKDISSALQANPSLTELSLCTNELGDAGVHLVLQGLQSPTCKIRKLSLQNCCLTKTGCGVLPDMLRSMPTLRELYLNDNPLGDAGLQLLCSGLLDPQCHLEKLQVEYCNLTAASCESLASALRAKRHFKELAVSNNELGEAGVRVLCRGLVDSACQLEVLKLENCGLTSASCEDLCGVVASKPSLQELDLGDNKLGDQGIATLCPRLLHPSCQIRVLWLWDCDITTAGCRDLCRVLRAKESLKEMSLAGNALGDEGARLLCESLLEPACQLQSLWVKSCSFTAASCQHFSSMLTRNTCLVELQLSNNKLGDCGVQQLCQGLSQPGAALQVLWLGDCDVAHSGCASLASVLLVNRSLRELDLSNNCMGEEGILRLMESVLQPGCVLEQLVLYDIYWSEEMDNSLRALEGRKPSLRVIF

SEQ ID NO: 95 - DNA, 1404 bp, synthetic construct
  misc_feature 1..1404: note = Variant of RNase inhibitor
  source 1..1404: mol_type = other DNA
atgcaccatcatcatcatcatggcggtagcggcaccatgtctctggatattcagtgtcagcaattgtcagatgcgcgttggacggaactgttaccgcttctgcaacagagcgaagtggtgcgcctggatgactgcggcctcactgagatgcgctgcaaagacatcagtagtgcactgcaagccaacccatcgttgaccgaattaagcctgtgtacaaatgagctgggtgatgctggagttcatttagtcctgcagggcttgcagtctcctacctgcaagattcgtaaactgtccctccagaactgttgtctgacgaagactggttgcggtgtattaccggacatgcttcgttcaatgcccaccctgcgcgaactgtatctgaatgataacccgttgggcgatgcgggcctccagctgctttgctccgggctgttagacccgcaatgtcacctggagaaactgcaggtcgaatactgcaatctcacagcagcctcgtgcgaaagcttggcgagcgctctgcgtgccaaacgccattttaaagaattagcggtttcgaacaacgaactgggtgaagcaggcgtgcgcgtactttgtcgtgggctggtggatagtgcgtgccaactggaggttctgaaactggaaaattgtggattgacctctgcctcctgcgaggatctttgtggtgtggtcgctagcaaaccaagcctccaggaattggaccttggcgataacaaattaggtgaccaaggcatcgcaacgttatgcccgcgcctacttcacccttcatgccagattcgtgttttgtggctctgggattgtgatatcaccaccgccggctgccgcgacctctgtcgtgtattacgcgcgaaggaatccctcaaagagatgagtcttgcgggtaatgccttgggagatgaaggcgcacgtctcttgtgcgaatcgttattagaaccggcgtgccagctccagagcctttgggtgaaaagctgttctttcactgctgcttcatgccagcattttagttcgatgttgacgcgcaacacgtgtcttgtcgagctccaattgagcaataataaattaggtgattgtggcgtgcagcagctttgccaagggttatctcaaccaggtgccgccctccaggttttgtggttgggcgactgtgatgtagcacatagtggctgtgcaagcttagcttccgtgttgcttgtcaaccgttccttacgcgaactcgaccttagtaacaactgcatgggcgaagaagggattctccgtttgatggagagcgttgaacaaccgggatgcgtgcttgaacagttggtcctctatgacatctactggtcggaggagatggataatctgttacgtgccttagaaggtcgcaaaccgtcattgcgcgtgattttc

SEQ ID NO: 96 - protein, 468 aa, synthetic construct
  REGION 1..468: note = Variant of RNase inhibitor
MHHHHHHGGSGTMSLDIQCQQLSDARWTELLPLLQQSEVVRLDDCGLTEMRCKDISSALQANPSLTELSLCTNELGDAGVHLVLQGLQSPTCKIRKLSLQNCCLTKTGCGVLPDMLRSMPTLRELYLNDNPLGDAGLQLLCSGLLDPQCHLEKLQVEYCNLTAASCESLASALRAKRHFKELAVSNNELGEAGVRVLCRGLVDSACQLEVLKLENCGLTSASCEDLCGVVASKPSLQELDLGDNKLGDQGIATLCPRLLHPSCQIRVLWLWDCDITTAGCRDLCRVLRAKESLKEMSLAGNALGDEGARLLCESLLEPACQLQSLWVKSCSFTAASCQHFSSMLTRNTCLVELQLSNNKLGDCGVQQLCQGLSQPGAALQVLWLGDCDVAHSGCASLASVLLVNRSLRELDLSNNCMGEEGILRLMESVEQPGCVLEQLVLYDIYWSEEMDNLLRALEGRKPSLRVIF

SEQ ID NO: 97 - DNA, 1404 bp, synthetic construct
  misc_feature 1..1404: note = Variant of RNase inhibitor
  source 1..1404: mol_type = other DNA
atgcaccatcatcatcatcatggcggtagcggcaccatgtctctggatattcagtgtcagcaattgtcagatgcgcgttggacggaactgttaccgcttctgcaacagagcgaagtggtgcgcctggatgactgcggcctcactgagatgcgctgcaaagacatcagtagtgcactgcaagccaacccatcgttgaccgaattaagcctgtgtacaaatgagctgggtgatgctggagttcatttagtcctgcagggcttgcagtctcctacctgcaagattcgtaaactgtccctccagaactgttgtctgacgaagactggttgcggtgtattaccggacatgcttcgttcaatgcccaccctgcgcgaactgtatctgaatgataacccgttgggcgatgcgggcctccagctgctttgctccgggctgttagacccgcaatgtcacctggagaaactgcaggtcgaatactgcaatctcacagcagcctcgtgcgaaagcttggcgagcgctctgcgtgccaaacgccattttaaagaattagcggtttcgaacaacgaactgggtgaagcaggcgtgcgcgtactttgtcgtgggctggtggatagtgcgtgccaactggaggttctgaaactggaaaattgtggattgacctctgcctcctgcgaggatctttgtggtgtggtcgctagcaaaccaagcctccaggaattggaccttggcgataacaaattaggtgaccaaggcatcgcaacgttatgcccgcgcctgcttcacccttcatgccagattcgtgttttgtggctctgggattgtgatatcaccaccgccggctgccgcgacctctgtcgtgtattacgcgcgaaggaatccctcaaagagatgagtcttgcgggtaatgccttgggagatgaaggcgcacgtctcttgtgcgaatcgttattagaaccggcgtgccagctccagagcctttgggtgaaaagctgttctttcactgctgcttcatgccagcattttagttcgatgttgacgcgcaacacgtgtcttgtcgagctccaattgagcaataataaattaggtgattgtggcgtgcagcagctttgccaagggttatctcaaccaggtgccgccctccaggttttgtggttgggcgactgtgatgtagcacatagtggctgtgcaagcttagcttccgtgttgcttgtcaaccgttccttacgcgaactcgaccttagtaacaactgcatgggcgaagaagggattctccgtttgatggagagcgttgaacaaccgggatgcgtgcttgaacagttggtcctctatgacatctactggtcggaggagatggataatgctttacgtgccttagaaggtcgcaaaccgtcattgcgcgtgattttc

SEQ ID NO: 98 - protein, 468 aa, synthetic construct
  REGION 1..468: note = Variant of RNase inhibitor
MHHHHHHGGSGTMSLDIQCQQLSDARWTELLPLLQQSEVVRLDDCGLTEMRCKDISSALQANPSLTELSLCTNELGDAGVHLVLQGLQSPTCKIRKLSLQNCCLTKTGCGVLPDMLRSMPTLRELYLNDNPLGDAGLQLLCSGLLDPQCHLEKLQVEYCNLTAASCESLASALRAKRHFKELAVSNNELGEAGVRVLCRGLVDSACQLEVLKLENCGLTSASCEDLCGVVASKPSLQELDLGDNKLGDQGIATLCPRLLHPSCQIRVLWLWDCDITTAGCRDLCRVLRAKESLKEMSLAGNALGDEGARLLCESLLEPACQLQSLWVKSCSFTAASCQHFSSMLTRNTCLVELQLSNNKLGDCGVQQLCQGLSQPGAALQVLWLGDCDVAHSGCASLASVLLVNRSLRELDLSNNCMGEEGILRLMESVEQPGCVLEQLVLYDIYWSEEMDNALRALEGRKPSLRVIF

SEQ ID NO: 99 - DNA, 1404 bp, synthetic construct
  misc_feature 1..1404: note = Variant of RNase inhibitor
  source 1..1404: mol_type = other DNA
atgcaccatcatcatcatcatggcggtagcggcaccatgtctctggatattcagtgtcagcaattgtcagatgcgcgttggacggaactgttaccgcttctgcaacagagcgaagtggtgcgcctggatgactgcggcctcactgagatgcgctgcaaagacatcagtagtgcactgcaagccaacccatcgttgaccgaattaagcctgtgtacaaatgagctgggtgatgctggagttcatttagtcctgcagggcttgcagtctcctacctgcaagattcgtaaactgtccctccagaactgttgtctgacgaagactggttgcggtgtattaccggacatgcttcgttcaatgcccaccctgcgcgaactgtatctgaatgataacccgttgggcgatgcgggcctccagctgctttgctccgggctgttagacccgcaatgtcacctggagaaactgcaggtcgaatactgcaatctcacagcagcctcgtgcgaaagcttggcgagcgctctgcgtgccaaacgccattttaaagaattagcggtttcgaacaacgaactgggtgaagcaggcgtgcgcgtactttgtcgtgggctggtggatagtgcgtgccaactggaggttctgaaactggaaaattgtggattgacctctgcctcctgcgaggatctttgtggtgtgctggctagcaaaccaagcctccaggaattggaccttggcgataacaaattaggtgaccaaggcatcgcaacgttatgcccgcgcctgcttcacccttcatgccagattcgtgtcttgtggctctgggattgtgatatcaccaccgccggctgccgcgacctctgtcgtgtattacgcgcgaaggaatccctcaaagagatgagtcttgcgggtaatgccttgggagatgaaggcgcacgtctcttgtgcgaatcgttattagaaccggcgtgccagctccaaagcctttgggtgaaaagctgttctttcactgctgcttcatgccagcattttagttcgatgttgacgcgcaacacgtgtcttgtcgagctccaattgagcaataataaattaggtgattgtggcgtgcagcagctttgccaagggttatctcaaccaggtgccgccctccaggttttgtggttgggcgactgtgatgtagcacatagtggctgtgcaagcttagcttccgtgttgcttgtcaaccgttccttacgcgaactcgaccttagtaacaactgcatgggcgaagaagggattctccgtttgatggagagcctggaacaaccgggatgcgtgcttgaacagttggtcctctatgacatctactggtcggaggagatggataattctttacgtgccttagaaggtcgcaaaccgtcattgcgcgtgattttc

SEQ ID NO: 100 - protein, 468 aa, synthetic construct
  REGION 1..468: note = Variant of RNase inhibitor
MHHHHHHGGSGTMSLDIQCQQLSDARWTELLPLLQQSEVVRLDDCGLTEMRCKDISSALQANPSLTELSLCTNELGDAGVHLVLQGLQSPTCKIRKLSLQNCCLTKTGCGVLPDMLRSMPTLRELYLNDNPLGDAGLQLLCSGLLDPQCHLEKLQVEYCNLTAASCESLASALRAKRHFKELAVSNNELGEAGVRVLCRGLVDSACQLEVLKLENCGLTSASCEDLCGVLASKPSLQELDLGDNKLGDQGIATLCPRLLHPSCQIRVLWLWDCDITTAGCRDLCRVLRAKESLKEMSLAGNALGDEGARLLCESLLEPACQLQSLWVKSCSFTAASCQHFSSMLTRNTCLVELQLSNNKLGDCGVQQLCQGLSQPGAALQVLWLGDCDVAHSGCASLASVLLVNRSLRELDLSNNCMGEEGILRLMESLEQPGCVLEQLVLYDIYWSEEMDNSLRALEGRKPSLRVIF

SEQ ID NO: 101 - DNA, 1404 bp, synthetic construct
  misc_feature 1..1404: note = Variant of RNase inhibitor
  source 1..1404: mol_type = other DNA
atgcaccatcatcatcatcatggcggtagcggcaccatgtctctggatattcagtgtcagcaattgtcagatgcgcgttggacggaactgttaccgcttctgcaacagagcgaagtggtgcgcctggatgactgcggcctcactgagatgcgctgcaaagacatcagtagtgcactgcaagccaacccatcgttgaccgaattaagcctgtgtacaaatgagctgggtgatgctggagttcatttagtcctgcagggcttgcagtctcctacctgcaagattcgtaaactgtccctccagaactgttgtctgacgaagactggttgcggtgtattaccggacatgcttcgttcaatgcccacgctgcgcgaactgtatctgaatgataacccgttgggcgatgcgggcctccagctgctttgctccgggctgttagacccgcaatgtcacctggagaaactgcaggtcgaatactgcaatctcacagcagcctcgtgcgaaagcttggcgagcgctctgcgtgccaaacgccattttaaagaattagcggtttcgaacaacgaactgggtgaagcaggcgtgcgcgtactttgtcgtgggctggtggatagtgcgtgccaactggaggttctgaaactggaaaattgtggattgacctctgcctcctgcgaggatctttgtggtgtggtcgctagcaaaccaagcctccaggaattggaccttggcgataacaaattaggtgaccaaggcatcgcaacgttatgcccgcgcctgcttcacccttcatgccagattcgtgttttgtggctctgggattgtgatatcaccaccgccggctgccgcgacctctgtcgtgtattacgcgcgaaggaatccctcaaagagatgagtcttgcgggtaatgccttgggagatgaaggcgcacgtctcttgtgcgaatcgttattagaaccggcgtgccagctccagagcctttgggtgaaaagctgttcttttactgctgcttcatgccagcattttagttcgatgttgacgcgcaacacgtgtcttgtcgagctccaattgagcaataataaattaggtgattgtggcgtgcagcagctttgccaagggttatctcaaccaggttcggccctccaggttttgtggttgggcgactgtgatgtatcgcatagtggctgtgcaagcttagcttccgtgttgcttgtcaaccgttccttacgcgaactcgaccttagtaacaactgcatgggcgaagaagggattctccgtttgatggagagcgttgaacaaccgggatgcgtgcttgaacagttggtcctctatgacatctactggtcggaggagatggataattctttacgtgccttagaaggtcgcaaaccgtcattgcgcgtcattttc

SEQ ID NO: 102 - protein, 468 aa, synthetic construct
  REGION 1..468: note = Variant of RNase inhibitor
MHHHHHHGGSGTMSLDIQCQQLSDARWTELLPLLQQSEVVRLDDCGLTEMRCKDISSALQANPSLTELSLCTNELGDAGVHLVLQGLQSPTCKIRKLSLQNCCLTKTGCGVLPDMLRSMPTLRELYLNDNPLGDAGLQLLCSGLLDPQCHLEKLQVEYCNLTAASCESLASALRAKRHFKELAVSNNELGEAGVRVLCRGLVDSACQLEVLKLENCGLTSASCEDLCGVVASKPSLQELDLGDNKLGDQGIATLCPRLLHPSCQIRVLWLWDCDITTAGCRDLCRVLRAKESLKEMSLAGNALGDEGARLLCESLLEPACQLQSLWVKSCSFTAASCQHFSSMLTRNTCLVELQLSNNKLGDCGVQQLCQGLSQPGSALQVLWLGDCDVSHSGCASLASVLLVNRSLRELDLSNNCMGEEGILRLMESVEQPGCVLEQLVLYDIYWSEEMDNSLRALEGRKPSLRVIF

SEQ ID NO: 103 - DNA, 1404 bp, synthetic construct
  misc_feature 1..1404: note = Variant of RNase inhibitor
  source 1..1404: mol_type = other DNA
atgcaccatcatcatcatcatggcggtagcggcaccatgtctctggatattcagtgtcagcaattgtcagatgcgcgttggacggaactgttaccgcttctgcaacagagcgaagtggtgcgcctggatgactgcggcctcactgagatgcgctgcaaagacatcagtagtgcactgcaagccaacccatcgttgaccgaattaagcctgtgtacaaatgagctgggtgatgctggagttcatttagtcctgcagggcttgcagtctcctacctgcaagattcgtaaactgtccctccagaactgttgtctgacgaagactggttgcggtgtattaccggacatgcttcgttcaatgcccaccctgcgcgaactgtatctgaatgataacccgttgggcgatgcgggcctccagctgctttgctccgggctgttagacccgcaatgtcacctggagaaactgcaggtcgaatactgcaatctcacagcagcctcgtgcgaaagcttggcgagcgctctgcgtgccaaacgccattttaaagaattagcggtttcgaacaacgaactgggtgaagcaggcgtgcgcgtactttgtcgtgggctggtggatagtgcgtgccaactggaggttctgaaactggaaaattgtggattgacctctgcctcctgcgaggatctttgtggtgtggtcgctagcaaaccaagcctccaggaattggaccttggcgataacaaattaggtgaccaaggcatcgcaacgttatgcccgactctgcttcacccttcatgccagattcgtgttttgtggctctgggattgtgatatcaccaccgccggctgccgcgacctctgtcgtgtattacgcgcgaaggaatccctcaaagagatgagtcttgcgggtaatgccttgggagatgaaggcgcacgtctcttgtgcgaatcgttattagaaccggcgtgccagctccagagcctttgggtgaaaagctgttctttcactgctgcttcatgccagcattttagttcgatgttgacgcgcaacacgtgtcttgtcgagctccaattgagcaataataaattaggtgattgtggcgtgcagcagctttgccaagggttatctcaaccaggtgccgccctccaggttttgtggttgggcgactgtgatgtagcacatagtggctgtgcaagcttagcttccgtgttgcttgtcaaccgttccttacgcgaactcgaccttagtaacaactgcatgggcgaagaagggattctccgtttgatggagagcgttgaacaaccgggatgcgtgcttgaacagttggtcctctatgacatctactggtcggaggagatggataattctttacgtgccttagaaggtcgcaaaccgtcattgcgcgtgattttc

SEQ ID NO: 104 - protein, 468 aa, synthetic construct
  REGION 1..468: note = Variant of RNase inhibitor
MHHHHHHGGSGTMSLDIQCQQLSDARWTELLPLLQQSEVVRLDDCGLTEMRCKDISSALQANPSLTELSLCTNELGDAGVHLVLQGLQSPTCKIRKLSLQNCCLTKTGCGVLPDMLRSMPTLRELYLNDNPLGDAGLQLLCSGLLDPQCHLEKLQVEYCNLTAASCESLASALRAKRHFKELAVSNNELGEAGVRVLCRGLVDSACQLEVLKLENCGLTSASCEDLCGVVASKPSLQELDLGDNKLGDQGIATLCPTLLHPSCQIRVLWLWDCDITTAGCRDLCRVLRAKESLKEMSLAGNALGDEGARLLCESLLEPACQLQSLWVKSCSFTAASCQHFSSMLTRNTCLVELQLSNNKLGDCGVQQLCQGLSQPGAALQVLWLGDCDVAHSGCASLASVLLVNRSLRELDLSNNCMGEEGILRLMESVEQPGCVLEQLVLYDIYWSEEMDNSLRALEGRKPSLRVIF

SEQ ID NO: 105 - DNA, 1404 bp, synthetic construct
  misc_feature 1..1404: note = Variant of RNase inhibitor
  source 1..1404: mol_type = other DNA
atgcaccatcatcatcatcatggcggtagcggcaccatgtctctggatattcagtgtcagcaattgtcagatgcgcgttggacggaactgttaccgcttctgcaacagagcgaagtggtgcgcctggatgactgcggcctcactgagatgcgctgcaaagacatcagtagtgcactgcaagccaacccatcgttgaccgaattaagcctgtgtacaaatgagctgggtgatgctggagttcatttagtcctgcagggcttgcagtctcctacctgcaagattcgtaaactgtccctccagaactgttgtctgacgaagactggttgcggtgtattaccggacatgcttcgttcaatgcccaccctgcgcgaactgtatctgaatgataacccgttgggcgatgcgggcctccagctgctttgctccgggctgttagacccgcaatgtcacctggagaaactgcaggtcgaatactgcaatctcacagcagcctcgtgcgaaagcttggcgagcgctctgcgtgccaaacgccattttaaagaattagcggtttcgaacaacgaactgggtgaagcaggcgtgcgcgtactttgtcgtgggctggtggatagtgcgtgccaactggaggttctgaaactggaaaattgtggattgacctctgcctcctgcgaggatctttgtggtgtggtcgctagcaaaccaagcctccaggaattggaccttggcgataacaaattaggtgaccaaggcatcgcaacgttatgcccgcgcctgcttcacccttcatgccagattcgtgttttgtggctctgggattgtgatatcaccaccgccggctgccgcgacctctgtcgtgtattacgcgcgaaggaatccctcaaagagatgagtcttgcgggtaatgccttgggagatgaaggcgcacgtctcttgtgcgaatcgttattagaaccggcgtgccagctccagagcctttgggtgaaaagctgttctttcactgctgcttcatgccagcattttagttcgatgttgacgcgcaacacgtgtcttgtcgagctccaattgagcaataataaattaggtgattgtggcgtgcagcagctttgccaagggttatctcaaccaggtgccgccctccaggttttgtggttgggcgactgtgatgtagcacatagtggctgtgcaagcttagcttccgtgttgcttgtcaaccgttccttacgcgaactcgaccttagtaacaactgcatgggcgaagaagggattctccgtttgatggagagcgttgaacaaccgggatgcgtgcttgaacagttggtcctctatgacatctactggtcggaggagatggataattctttacgtgccttagaaaagcgcaaaccgtcattgcgcgtgattttc

SEQ ID NO: 106 - protein, 468 aa, synthetic construct
  REGION 1..468: note = Variant of RNase inhibitor
MHHHHHHGGSGTMSLDIQCQQLSDARWTELLPLLQQSEVVRLDDCGLTEMRCKDISSALQANPSLTELSLCTNELGDAGVHLVLQGLQSPTCKIRKLSLQNCCLTKTGCGVLPDMLRSMPTLRELYLNDNPLGDAGLQLLCSGLLDPQCHLEKLQVEYCNLTAASCESLASALRAKRHFKELAVSNNELGEAGVRVLCRGLVDSACQLEVLKLENCGLTSASCEDLCGVVASKPSLQELDLGDNKLGDQGIATLCPRLLHPSCQIRVLWLWDCDITTAGCRDLCRVLRAKESLKEMSLAGNALGDEGARLLCESLLEPACQLQSLWVKSCSFTAASCQHFSSMLTRNTCLVELQLSNNKLGDCGVQQLCQGLSQPGAALQVLWLGDCDVAHSGCASLASVLLVNRSLRELDLSNNCMGEEGILRLMESVEQPGCVLEQLVLYDIYWSEEMDNSLRALEKRKPSLRVIF

SEQ ID NO: 107 - DNA, 1404 bp, synthetic construct
  misc_feature 1..1404: note = Variant of RNase inhibitor
  source 1..1404: mol_type = other DNA
atgcaccatcatcatcatcatggcggtagcggcaccatgtctctggatattcagtgtcagcaattgtcagatgcgcgttggacggaactgttaccgcttctgcaacagagcgaagtggtgcgcctggatgactgcggcctcactgagatgcgctgcaaagacatcagtagtgcactgcaagccaacccatcgttgaccgaattaagcctgtgtacaaatgagctgggtgatgctggagttcatttagtcctgcagggcttgcagtctcctacctgcaagattcgtaaactgtccctccagaactgttgtctgacgaagactggttgcggtgtattaccggacatgcttcgttcaatgcccaccctgcgcgaactgtatctgaatgataacccgttgggcgatgcgggcctccagctgctttgctccgggctgttagacccgcaatgtcacctggagaaactgcaggtcgaatactgcaatctcacagcagcctcgtgcgaaagcttggcgagcgctctgcgtgccaaacgccattttaaagaattagcggtttcgaacaacgaactgggtgaagcaggcgtgcgcgtactttgtcgtgggctggtggatagtgcgtgccaactggaggttctgaaactggaaaattgtggattgacctctgcctcctgcgaggatctttgtggtgtggtcgctagcaaaccaagcctccaggaattggaccttggcgataacaaattaggtgaccaaggcatcgcaacgttatgcccgcgcctgcttcacccgtcatgccagattcgtgttttgtggctctggcagtgtgatatcaccaccgccggctgccgcgacctctgtcgtgtattacgcgcgaaggaatccctcaaagagatgagtcttgcgggtaatgccttgggagatgaaggcgcacgtctcttgtgcgaatcgttattagaaccggcgtgccagctccagagcctttgggtgaaaagctgttctttcactgctgcttcatgccagcattttagttcgatgttgacgcgcaacacgtgtcttgtcgagctccaattgagcaataataaattaggtgattgtggcgtgcagcagctttgccaagggttatctcaaccaggtgccgccctccaggttttgtggttgggcgactgtgatgtagcacatagtggctgtgcaagcttagcttccgtgttgcttgtcaaccgttccttacgcgaactcgaccttagtaacaactgcatgggcgaagaagggattctccgtttgatggagagcgttgaacaaccgggatgcgtgcttgaacagttggtcctctatgacatctactggtcggaggagatggataattctttacgtgccttagaaggtcgcaaaccgtcattgcgcgtgattttc

SEQ ID NO: 108 - protein, 468 aa, synthetic construct
  REGION 1..468: note = Variant of RNase inhibitor
MHHHHHHGGSGTMSLDIQCQQLSDARWTELLPLLQQSEVVRLDDCGLTEMRCKDISSALQANPSLTELSLCTNELGDAGVHLVLQGLQSPTCKIRKLSLQNCCLTKTGCGVLPDMLRSMPTLRELYLNDNPLGDAGLQLLCSGLLDPQCHLEKLQVEYCNLTAASCESLASALRAKRHFKELAVSNNELGEAGVRVLCRGLVDSACQLEVLKLENCGLTSASCEDLCGVVASKPSLQELDLGDNKLGDQGIATLCPRLLHPSCQIRVLWLWQCDITTAGCRDLCRVLRAKESLKEMSLAGNALGDEGARLLCESLLEPACQLQSLWVKSCSFTAASCQHFSSMLTRNTCLVELQLSNNKLGDCGVQQLCQGLSQPGAALQVLWLGDCDVAHSGCASLASVLLVNRSLRELDLSNNCMGEEGILRLMESVEQPGCVLEQLVLYDIYWSEEMDNSLRALEGRKPSLRVIF

SEQ ID NO: 109 - DNA, 1404 bp, synthetic construct
  misc_feature 1..1404: note = Variant of RNase inhibitor
  source 1..1404: mol_type = other DNA
atgcaccatcatcatcatcatggcggtagcggcaccatgtctctggatattcagtgtcagcaattgtcagatgcgcgttggacggaactgttaccgcttctgcaacagagcgaagtggtgcgcctggatgactgcggcctcactgagatgcgctgcaaagacatcagtagtgcactgcaagccaacccatcgttgaccgaattaagcctgtgtacaaatgagctgggtgatgctggagttcatttagtcctgcagggcttgcagtctcctacctgcaagattcgtaaactgtccctccagaactgttgtctgacgaagactggttgcggtgtattaccggacatgcttcgttcaatgcccaccctgcgcgaactgtatctgaatgataacccgttgggcgatgcgggcctccagctgctttgctccgggctgttagacccgcaatgtcacctggagaaactgcaggtcgaatactgcaatctcacagcagcctcgtgcgaaagcttggcgagcgctctgcgtgccaaacgccattttaaagaattagcggtttcgaacaacgaactgggtgaagcaggcgtgcgcgtactttgtcgtgggctggtggatagtgcgtgccaactggaggttctgaaactggaaaattgtggattgacctctgcctcctgcgaggatctttgtggtgtggtcgctagcaaaccaagcctccaggaattggaccttggcgataacaaattaggtgaccaaggcatcgcaacgttatgcccgcgcctgcttcacccttcatgccagattcgtgttttgtggctctgggattgtgatatcaccaccgccggctgccgcgacctctgtcgtgtattacgcgcgaaggaatccctcaaagagatgagtcttgcgggtaatgccttgggagatgaaggcgcacgtctcttgtgcgaatcgttattagaaccggcgtgccagctccagagcctttgggtgaaaagctgttctttcactgctgcttcatgccagcattttagttcgatgttgacgcgcaacacgtgtcttgtcgagctccaattgagcaataataaattaggtgattgtggcgtgcagcagctttgccaagggttatctcaaccaggtgccgccctccaggttttgtggttgggcgactgtgatgtagcacatagtggctgtgcaagcttagcttccgtgttgcttgtcaaccgttccttacgcgaactcgaccttagtaacaactgcatgggcgaagaagggattctccgtttgatggagagcgttgggcaaccgggatgcgtgcttgaacagttggtcctctatgacatctactggtcggaggagatggataattctttacgtgccttagaaggtcgcaaaccgtcattgcgcgtgattttc

SEQ ID NO: 110 - protein, 468 aa, synthetic construct
  REGION 1..468: note = Variant of RNase inhibitor
MHHHHHHGGSGTMSLDIQCQQLSDARWTELLPLLQQSEVVRLDDCGLTEMRCKDISSALQANPSLTELSLCTNELGDAGVHLVLQGLQSPTCKIRKLSLQNCCLTKTGCGVLPDMLRSMPTLRELYLNDNPLGDAGLQLLCSGLLDPQCHLEKLQVEYCNLTAASCESLASALRAKRHFKELAVSNNELGEAGVRVLCRGLVDSACQLEVLKLENCGLTSASCEDLCGVVASKPSLQELDLGDNKLGDQGIATLCPRLLHPSCQIRVLWLWDCDITTAGCRDLCRVLRAKESLKEMSLAGNALGDEGARLLCESLLEPACQLQSLWVKSCSFTAASCQHFSSMLTRNTCLVELQLSNNKLGDCGVQQLCQGLSQPGAALQVLWLGDCDVAHSGCASLASVLLVNRSLRELDLSNNCMGEEGILRLMESVGQPGCVLEQLVLYDIYWSEEMDNSLRALEGRKPSLRVIF

SEQ ID NO: 111 - DNA, 1404 bp, synthetic construct
  misc_feature 1..1404: note = Variant of RNase inhibitor
  source 1..1404: mol_type = other DNA
atgcaccatcatcatcatcatggcggtagcggcaccatgtctctggatattcagtgtcagcaattgtcagatgcgcgttggacggaactgttaccgcttctgcaacagagcgaagtggtgcgcctggatgactgcggcctcactgagatgcgctgcaaagacatcagtagtgcactgcaagccaacccatcgttgaccgaattaagcctgtgtacaaatgagctgggtgatgctggagttcatttagtcctgcagggcttgcagtctcctacctgcaagattcgtaaactgtccctccagaactgttgtctgacgaagactggttgcggtgtattaccggacatgcttcgttcaatgcccaccctgcgcgaactgtatctgaatgataacccgttgggcgatgcgggcctccagctgctttgctccgggctgttagacccgcaatgtcacctggagaaactgcaggtcgaatactgcaatctcacagcagcctcgtgcgaaagcttggcgagcgctctgcgtgccaaacgccattttaaagaattagcggtttcgaacaacgaactgggtgaagcaggcgtgcgcgtactttgtcgtgggctggtggatagtgcgtgccaactggaggttctgaaactggaaaattgtggattgacctctgcctcctgcgaggatctttgtggtgtggtcgctagcaaaccaagcctccaggaattggaccttggcgataacaaattaggtgaccaaggcatcgcaacgttatgcccgcgcctgcttcacccttcatgccagattcgtgttttgtggctctgggattgtgatatcaccaccgccggctgccgcgacctctgtcgtgtattacgcgcgaaggaatccctcaaagagatgagtcttgcgggtaatgccttgggagatgaaggcgcacgtctcttgtgcgaatcgttattagaaccggcgtgccagctccagagcctttgggtgaaaagctgttctttcactgctgcttcatgccagcattttagttcgatgttgacgcgcaacacgtgtcttgtcgagctccaattgagcaataataaattaggtgattgtggcgtgcagcagctttgccaagggttatctcaaccaggtgccgccctccaggttttgtggttgggcgactgtgatgtagcacatagtggctgtgcaagcttagcttccgtgttgcttgtcaaccgttccttacgcgaactcgaccttagtaacaactgcatgggcgaagaagggattctccgtttgatggagagcgttgaacaaccgggatgcgtgcttgaacagttggtcctctatgacatctactggtcggaggagatggataataagttacgtgccttagaaggtcgcaaaccgtcattgcgcgtgattttc

SEQ ID NO: 112 - protein, 468 aa, synthetic construct
  REGION 1..468: note = Variant of RNase inhibitor
MHHHHHHGGSGTMSLDIQCQQLSDARWTELLPLLQQSEVVRLDDCGLTEMRCKDISSALQANPSLTELSLCTNELGDAGVHLVLQGLQSPTCKIRKLSLQNCCLTKTGCGVLPDMLRSMPTLRELYLNDNPLGDAGLQLLCSGLLDPQCHLEKLQVEYCNLTAASCESLASALRAKRHFKELAVSNNELGEAGVRVLCRGLVDSACQLEVLKLENCGLTSASCEDLCGVVASKPSLQELDLGDNKLGDQGIATLCPRLLHPSCQIRVLWLWDCDITTAGCRDLCRVLRAKESLKEMSLAGNALGDEGARLLCESLLEPACQLQSLWVKSCSFTAASCQHFSSMLTRNTCLVELQLSNNKLGDCGVQQLCQGLSQPGAALQVLWLGDCDVAHSGCASLASVLLVNRSLRELDLSNNCMGEEGILRLMESVEQPGCVLEQLVLYDIYWSEEMDNKLRALEGRKPSLRVIF

SEQ ID NO: 113 - DNA, 1404 bp, synthetic construct
  misc_feature 1..1404: note = Variant of RNase inhibitor
  source 1..1404: mol_type = other DNA
atgcaccatcatcatcatcatggcggtagcggcaccatgtctctggatattcagtgtcagcaattgtcagatgcgcgttggacggaactgttaccgcttctgcaacagagcgaagtggtgcgcctggatgactgcggcctcactgagatgcgctgcaaagacatcagtagtgcactgcaagccaacccatcgttgaccgaattaagcctgtgtacaaatgagctgggtgatgctggagttcatttactgctgcagggcttgcagtctcctacctgcaagattcgtaaactgtccctccagaactgttgtctgacgaagattggttgcggtgtattaccggacatgcttcgttcaatgcccaccctgcgcgaactgtatctgaatgataacccgttgggcgatgcgggcctccagctgctttgctccgggctgttagacccgcaatgtcacctggagaaactgcaggtcgaatactgcaatctcacagcagcctcgtgcgaaagcttggcgagcgctctgcgtgccaaacgccattttaaagaattagcggtttcgaacaacgaactgggtgaagcaggcgtgcgcgtactttgtcgtgggctggtggatagtgcgtgccaactggaggttctgaaactggaaaattgtggattgacctctgcctcctgcgaggatctttgtggtgtgctggctagcaaaccaagcctccaggaattggaccttggcgataacaaattaggtgaccaaggcatcgcaacgttatgcccgcgcctgcttcacccttcatgccagattcgtacgttgtggctctgggattgtgatatcaccaccgccggctgccgcgacctctgtcgtgtattacgcgcgaaggaatccctcaaagagatgagtcttgcgggtaatgccttgggagatgaaggcgcacgtctcttgtgcgaatcgttattagaaccggcgtgccagctccaaagcctttgggtgaaaagctgttctttcactgctgcttcatgccagcattttagttcgatgttgacgcgcaacacgtgtcttgtcgagctccaattgagcaataataaattaggtgattgtggcgtgcagcagctttgccaagggttatctcaaccaggtgccgccctccaggttttgtggttgggcgactgtgatgtagcacatagtggctgtgcaagcttagcttccgtgttgcttgtcaaccgttccttacgcgaactcgaccttagtaacaactgcatgggcgaagaagggattctccgtttgatggagagcctggaacaaccgggatgcgtgcttgaacagttggtcctctatgacatctactggtcggaggagatggataattctttacgtgccttagaaggtcgcaaaccgtcattgcgcgtgattttc

SEQ ID NO: 114 - protein, 468 aa, synthetic construct
  REGION 1..468: note = Variant of RNase inhibitor
MHHHHHHGGSGTMSLDIQCQQLSDARWTELLPLLQQSEVVRLDDCGLTEMRCKDISSALQANPSLTELSLCTNELGDAGVHLLLQGLQSPTCKIRKLSLQNCCLTKIGCGVLPDMLRSMPTLRELYLNDNPLGDAGLQLLCSGLLDPQCHLEKLQVEYCNLTAASCESLASALRAKRHFKELAVSNNELGEAGVRVLCRGLVDSACQLEVLKLENCGLTSASCEDLCGVLASKPSLQELDLGDNKLGDQGIATLCPRLLHPSCQIRTLWLWDCDITTAGCRDLCRVLRAKESLKEMSLAGNALGDEGARLLCESLLEPACQLQSLWVKSCSFTAASCQHFSSMLTRNTCLVELQLSNNKLGDCGVQQLCQGLSQPGAALQVLWLGDCDVAHSGCASLASVLLVNRSLRELDLSNNCMGEEGILRLMESLEQPGCVLEQLVLYDIYWSEEMDNSLRALEGRKPSLRVIF

SEQ ID NO: 115 - DNA, 1404 bp, synthetic construct
  misc_feature 1..1404: note = Variant of RNase inhibitor
  source 1..1404: mol_type = other DNA
atgcaccatcatcatcatcatggcggtagcggcaccatgtctctggatattcagtgtcagcaattgtcagatgcgcgttggacggaactgttaccgcttctgcaacagagcgaagtggtgcgcctggatgactgcggcctcactgagatgcgctgcaaagacatcagtagtgcactgcaagccaacccatcgttgaccgaattaagcctgtgtacaaatgagctgggtgatgctggagttcatttagtcctgcagggcttgcagtctcctacctgcaagattcgtaaactgtccctccagaactgttgtctgacgaagactggttgcggtgtattaccggacatgcttcgttcaatgcccaccctgcgcgaactgtatctgaatgataacccgttgggcgatgcgggcctccagctgctttgctccgggctgttagacccgcaatgtcacctggagaaactgcaggtcgaatactgcaatctcacagcagcctcgtgcgaaagcttggcgagcgctctgcgtgccaaacgccattttaaagaattagcggtttcgaacaacgaactgggtgaagcaggcgtgcgcgtactttgtcgtgggctggtggatagtgcgtgccaactggaggttctgaaactggaaaattgtggattgacctctgcctcctgcgaggatctttgtggtgtggtcgctagcaaaccaagcctccaggaattggaccttggcgataacaaattaggtgaccaaggcatcgcaacgttatgcccgcgcctgcttcacccttcatgccagattcgtcgtttgtggctctgggattgtgatatcaccaccgccggctgccgcgacctctgtcgtgtattacgcgcgaaggaatccctcaaagagatgagtcttgcgggtaatgccttgggagatgaaggcgcacgtctcttgtgcgaatcgttattagaaccggcgtgccagctccagagcctttgggtgaaaagctgttctttcactgctgcttcatgccagcattttagttcgatgttgacgcgcaacacgtgtcttgtcgagctccaattgagcaataataaattaggtgattgtggcgtgcagcagctttgccaagggttatctcaaccaggtgccgccctccaggttttgtggttgggcgactgtgatgtagcacatagtggctgtgcaagcttagcttccgtgttgcttgtcaaccgttccttacgcgaactcgaccttagtaacaactgcatgggcgaagaagggattctccgtttgatggagagcgttgaacaaccgggatgcgtgcttgaacagttggtcctctatgacatctactggtcggaggagatggataattctttacgtgccttagaaggtcgcaaaccgtcattgcgcgtgattttc

SEQ ID NO: 116 - protein, 468 aa, synthetic construct
  REGION 1..468: note = Variant of RNase inhibitor
MHHHHHHGGSGTMSLDIQCQQLSDARWTELLPLLQQSEVVRLDDCGLTEMRCKDISSALQANPSLTELSLCTNELGDAGVHLVLQGLQSPTCKIRKLSLQNCCLTKTGCGVLPDMLRSMPTLRELYLNDNPLGDAGLQLLCSGLLDPQCHLEKLQVEYCNLTAASCESLASALRAKRHFKELAVSNNELGEAGVRVLCRGLVDSACQLEVLKLENCGLTSASCEDLCGVVASKPSLQELDLGDNKLGDQGIATLCPRLLHPSCQIRRLWLWDCDITTAGCRDLCRVLRAKESLKEMSLAGNALGDEGARLLCESLLEPACQLQSLWVKSCSFTAASCQHFSSMLTRNTCLVELQLSNNKLGDCGVQQLCQGLSQPGAALQVLWLGDCDVAHSGCASLASVLLVNRSLRELDLSNNCMGEEGILRLMESVEQPGCVLEQLVLYDIYWSEEMDNSLRALEGRKPSLRVIF

SEQ ID NO: 117 - DNA, 1404 bp, synthetic construct
  misc_feature 1..1404: note = Variant of RNase inhibitor
  source 1..1404: mol_type = other DNA
atgcaccatcatcatcatcatggcggtagcggcaccatgtctctggatattcagtgtcagcaattgtcagatgcgcgttggacggaactgttaccgcttctgcaacagagcgaagtggtgcgcctggatgactgcggcctcactgagatgcgctgcaaagacatcagtagtgcactgcaagccaacccatcgttgaccgaattaagcctgtgtacaaatgagctgggtgatgctggagttcatttagtcctgcagggcttgcagtctcctacctgcaagattcgtaaactgtccctccagaactgttgtctgacgaagattggttgcggtgtattaccggacatgcttcgttcaatgcccaccctgcgcgaactgtatctgaatgataacccgttgggcgatgcgggcctccagctgctttgctccgggctgttagacccgcaatgtcacctggagaaactgcaggtcgaatactgcaatctcacagcagcctcgtgcgaaagcttggcgagcgctctgcgtgccaaacgccattttaaagaattagcggtttcgaacaacgaactgggtgaagcaggcgtgcgcgtactttgtcgtgggctggtggatagtgcgtgccaactggaggttctgaaactggaaaattgtggattgacctctgcctcctgcgaggatctttgtggtgtggtggctagcaaaccaagcctccaggaattggaccttggcgataacaaattaggtgaccaaggcatcgcaacgttatgcccgcgcctgcttcacccttcatgccagattcgtgtcttgtggctctgggattgtgatatcaccaccgccggctgccgcgacctctgtcgtgtattacgcgcgaaggaatccctcaaagagatgagtcttgcgggtaatgccttgggagatgaaggcgcacgtctcttgtgcgaatcgttattagaaccggcgtgccagctccaaagcctttgggtgaaaagctgttctttcactgctgcttcatgccagcattttagttcgatgttgacgcgcaacacgtgtcttgtcgagctccaattgagcaataataaattaggtgattgtggcgtgcagcagctttgccaagggttatctcaaccaggtgccgccctccaggttttgtggttgggcgactgtgatgtagcacatagtggctgtgcaagcttagcttccgtgttgcttgtcaaccgttccttacgcgaactcgaccttagtaacaactgcatgggcgaagaagggattctccgtttgatggagagcctggaacaaccgggatgcgtgcttgaacagttggtcctctatgacatctactggtcggaggagatggataattctttacgtgccttagaaggtcgcaaaccgtcattgcgcgtgattttc

SEQ ID NO: 118 - protein, 468 aa, synthetic construct
  REGION 1..468: note = Variant of RNase inhibitor
MHHHHHHGGSGTMSLDIQCQQLSDARWTELLPLLQQSEVVRLDDCGLTEMRCKDISSALQANPSLTELSLCTNELGDAGVHLVLQGLQSPTCKIRKLSLQNCCLTKIGCGVLPDMLRSMPTLRELYLNDNPLGDAGLQLLCSGLLDPQCHLEKLQVEYCNLTAASCESLASALRAKRHFKELAVSNNELGEAGVRVLCRGLVDSACQLEVLKLENCGLTSASCEDLCGVVASKPSLQELDLGDNKLGDQGIATLCPRLLHPSCQIRVLWLWDCDITTAGCRDLCRVLRAKESLKEMSLAGNALGDEGARLLCESLLEPACQLQSLWVKSCSFTAASCQHFSSMLTRNTCLVELQLSNNKLGDCGVQQLCQGLSQPGAALQVLWLGDCDVAHSGCASLASVLLVNRSLRELDLSNNCMGEEGILRLMESLEQPGCVLEQLVLYDIYWSEEMDNSLRALEGRKPSLRVIF

SEQ ID NO: 119 - DNA, 1404 bp, synthetic construct
  misc_feature 1..1404: note = Variant of RNase inhibitor
  source 1..1404: mol_type = other DNA
atgcaccatcatcatcatcatggcggtagcggcaccatgtctctggatattcagtgtcagcaattgtcagatgcgcgttggacggaactgttaccgcttctgcaacagagcgaagtggtgcgcctggatgactgcggcctcactgagatgcgctgcaaagacatcagtagtgcactgcaagccaacccatcgttgaccgaattaagcctgtgtacaaatgagctgggtgatgctggagttcatttagtcctgcagggcttgcagtctcctacctgcaagattcgtaaactgtccctccagaactgttgtctgacgaagactggttgcggtgtattaccggacatgcttcgttcaatgcccaccctgcgcgaactgtatctgaatgataacccgttgggcgatgcgggcctccagctgctttgctccgggctgttagacccgcaatgtcacctggagaaactgcaggtcgaatactgcaatctcacagcagcctcgtgcgaaagcttggcgagcgctctgcgtgccaaacgccattttaaagaattagcggtttcgaacaacgaactgggtgaagcaggcgtgcgcgtactttgtcgtgggctggtggatagtgcgtgccaactggaggttctgaaactggaaaattgtggattgacctctgcctcctgcgaggatctttgtggtgtggtcgctagcaaaccaagcctccaggaattggaccttggcaggaacaaattaggtgaccaaggcatcgcaacgttatgcccgcgcctgcttcacccttcatgccagattcgtgttttgtggctctgggattgtgatatcaccaccgccggctgccgcgacctctgtcgtgtattacgcgcgaaggaatccctcaaagagatgagtcttgcgggtaatgccttgggagatgaaggcgcacgtctcttgtgcgaatcgttattagaaccggcgtgccagctccagagcctttgggtgaaaagctgttctttcactgctgcttcatgccagcattttagttcgatgttgacgcgcaacacgtgtcttgtcgagctccaattgagcaataataaattaggtgattgtggcgtgcagcagctttgccaagggttatctcaaccaggtgccgccctccaggttttgtggttgggcgactgtgatgtagcacatagtggctgtgcaagcttagcttccgtgttgcttgtcaaccgttccttacgcgaactcgaccttagtaacaactgcatgggcgaagaagggattctccgtttgatggagagcgttgaacaaccgggatgcgtgcttgaacagttggtcctctatgacatctactggtcggaggagatggataattctttacgtgccttagaaggtcgcaaaccgtcattgcgcgtgattttc

SEQ ID NO: 120 - protein, 468 aa, synthetic construct
  REGION 1..468: note = Variant of RNase inhibitor
MHHHHHHGGSGTMSLDIQCQQLSDARWTELLPLLQQSEVVRLDDCGLTEMRCKDISSALQANPSLTELSLCTNELGDAGVHLVLQGLQSPTCKIRKLSLQNCCLTKTGCGVLPDMLRSMPTLRELYLNDNPLGDAGLQLLCSGLLDPQCHLEKLQVEYCNLTAASCESLASALRAKRHFKELAVSNNELGEAGVRVLCRGLVDSACQLEVLKLENCGLTSASCEDLCGVVASKPSLQELDLGRNKLGDQGIATLCPRLLHPSCQIRVLWLWDCDITTAGCRDLCRVLRAKESLKEMSLAGNALGDEGARLLCESLLEPACQLQSLWVKSCSFTAASCQHFSSMLTRNTCLVELQLSNNKLGDCGVQQLCQGLSQPGAALQVLWLGDCDVAHSGCASLASVLLVNRSLRELDLSNNCMGEEGILRLMESVEQPGCVLEQLVLYDIYWSEEMDNSLRALEGRKPSLRVIF

SEQ ID NO: 121 - DNA, 1404 bp, synthetic construct
  misc_feature 1..1404: note = Variant of RNase inhibitor
  source 1..1404: mol_type = other DNA
atgcaccatcatcatcatcatggcggtagcggcaccatgtctctggatattcagtgtcagcaattgtcagatgcgcgttggacggaactgttaccgcttctgcaacagagcgaagtggtgcgcctggatgactgcggcctcactgagatgcgctgcaaagacatcagtagtgcactgcaagccaacccatcgttgaccgaattaagcctgtgtacaaatgagctgggtgatgctggagttcatttagtcctgcagggcttgcagtctcctacctgcaagattcgtaaactgtccctccagaactgttgtctgacgaagactggttgcggtgtattaccggacatgcttcgttcaatgcccaccctgcgcgaactgtatctgaatgataacccgttgggcgatgcgggcctccagctgctttgctccgggctgttagacccgcaatgtcacctggagaaactgcaggtcgaatactgcaatctcacagcagcctcgtgcgaaagcttggcgagcgctctgcgtgccaaacgccattttaaagaattagcggtttcgaacaacgaactgggtgaagcaggcgtgcgcgtactttgtcgtgggctggtggatagtgcgtgccaactggaggttctgaaactggaaaattgtggattgacctctgcctcctgcgaggatctttgtggtgtggtcgctagcaaaccaagcctccaggaattggaccttggcatgaacaaattaggtgaccaaggcatcgcaacgttatgcccgcgcctgcttcacccttcatgccagattcgtgttttgtggctctgggattgtgatatcaccaccgccggctgccgcgacctctgtcgtgtattacgcgcgaaggaatccctcaaagagatgagtcttgcgggtaatgccttgggagatgaaggcgcacgtctcttgtgcgaatcgttattagaaccggcgtgccagctccagagcctttgggtgaaaagctgttctttcactgctgcttcatgccagcattttagttcgatgttgacgcgcaacacgtgtcttgtcgagctccaattgagcaataataaattaggtgattgtggcgtgcagcagctttgccaagggttatctcaaccaggtgccgccctccaggttttgtggttgggcgactgtgatgtagcacatagtggctgtgcaagcttagcttccgtgttgcttgtcaaccgttccttacgcgaactcgaccttagtaacaactgcatgggcgaagaagggattctccgtttgatggagagcgttgaacaaccgggatgcgtgcttgaacagttggtcctctatgacatctactggtcggaggagatggataattctttacgtgccttagaaggtcgcaaaccgtcattgcgcgtgattttc

SEQ ID NO: 122 - protein, 468 aa, synthetic construct
  REGION 1..468: note = Variant of RNase inhibitor
MHHHHHHGGSGTMSLDIQCQQLSDARWTELLPLLQQSEVVRLDDCGLTEMRCKDISSALQANPSLTELSLCTNELGDAGVHLVLQGLQSPTCKIRKLSLQNCCLTKTGCGVLPDMLRSMPTLRELYLNDNPLGDAGLQLLCSGLLDPQCHLEKLQVEYCNLTAASCESLASALRAKRHFKELAVSNNELGEAGVRVLCRGLVDSACQLEVLKLENCGLTSASCEDLCGVVASKPSLQELDLGMNKLGDQGIATLCPRLLHPSCQIRVLWLWDCDITTAGCRDLCRVLRAKESLKEMSLAGNALGDEGARLLCESLLEPACQLQSLWVKSCSFTAASCQHFSSMLTRNTCLVELQLSNNKLGDCGVQQLCQGLSQPGAALQVLWLGDCDVAHSGCASLASVLLVNRSLRELDLSNNCMGEEGILRLMESVEQPGCVLEQLVLYDIYWSEEMDNSLRALEGRKPSLRVIF

SEQ ID NO: 123 - DNA, 1404 bp, synthetic construct
  misc_feature 1..1404: note = Variant of RNase inhibitor
  source 1..1404: mol_type = other DNA
atgcaccatcatcatcatcatggcggtagcggcaccatgtctctggatattcagtgtcagcaattgtcagatgcgcgttggacggaactgttaccgcttctgcaacagagcgaagtggtgcgcctggatgactgcggcctcactgagatgcgctgcaaagacatcagtagtgcactgcaagccaacccatcgttgaccgaattaagcctgtgtacaaatgagctgggtgatgctggagttcatttagtgctgcagggcttgcagtctcctacctgcaagattcgtaaactgtccctccagaactgttgtctgacgaaggcgggttgcggtgtattaccggacatgcttcgttcaatgcccaccctgcgcgaactgtatctgaatgataacccgttgggcgatgcgggcctccagctgctttgctccgggctgttagacccgcaatgtcacctggagaaactgcaggtcgaatactgcaatctcacagcagcctcgtgcgaaagcttggcgagcgctctgcgtgccaaacgccattttaaagaattagcggtttcgaacaacgaactgggtgaagcaggcgtgcgcgtactttgtcgtgggctggtggatagtgcgtgccaactggaggttctgaaactggaaaattgtggattgacctctgcctcctgcgaggatctttgtggtgtggtggctagcaaaccaagcctccaggaattggaccttggcgataacaaattaggtgaccaaggcatcgcaacgttatgcccacgcctgcttcacccttcatgccagattcgtgtcttgtggctctgggattgtgatatcaccaccgccggctgccgcgacctctgtcgtgtattacgcgcgaaggaatccctcaaagagatgagtcttgcgggtaatgccttgggagatgaaggcgcacgtctcttgtgcgaatcgttattagaaccggcgtgccagctcgaaagcctttgggtgaaaagctgttctttcactgctgcttcatgccagcattttagttcgatgttgacgcgcaacacgtgtcttgtcgagctccaattgagcaataataaattaggtgattgtggcgtgcagcagctttgccaagggttatctcaaccaggtgccgccctccaggttttgtggttgggcgactgtgatgtagcacatagtggctgtgcaagcttagcttccgtgttgcttgtcaaccgttccttacgcgaactcgaccttagtaacaactgcatgggcgaagaagggattctccgtttgatggagagcctggaacaaccgggatgcgtgcttgaacagttggtcctctatgacatctactggtcggaggagatggataattctttacgtgccttagaaggtcgcaaaccgtcattgcgcgtgattttc

SEQ ID NO: 124 - protein, 468 aa, synthetic construct
  REGION 1..468: note = Variant of RNase inhibitor
MHHHHHHGGSGTMSLDIQCQQLSDARWTELLPLLQQSEVVRLDDCGLTEMRCKDISSALQANPSLTELSLCTNELGDAGVHLVLQGLQSPTCKIRKLSLQNCCLTKAGCGVLPDMLRSMPTLRELYLNDNPLGDAGLQLLCSGLLDPQCHLEKLQVEYCNLTAASCESLASALRAKRHFKELAVSNNELGEAGVRVLCRGLVDSACQLEVLKLENCGLTSASCEDLCGVVASKPSLQELDLGDNKLGDQGIATLCPRLLHPSCQIRVLWLWDCDITTAGCRDLCRVLRAKESLKEMSLAGNALGDEGARLLCESLLEPACQLESLWVKSCSFTAASCQHFSSMLTRNTCLVELQLSNNKLGDCGVQQLCQGLSQPGAALQVLWLGDCDVAHSGCASLASVLLVNRSLRELDLSNNCMGEEGILRLMESLEQPGCVLEQLVLYDIYWSEEMDNSLRALEGRKPSLRVIF

SEQ ID NO: 125 - DNA, 1404 bp, synthetic construct
  misc_feature 1..1404: note = Variant of RNase inhibitor
  source 1..1404: mol_type = other DNA
atgcaccatcatcatcatcatggcggtagcggcaccatgtctctggatattcagtgtcagcaattgtcagatgcgcgttggacggaactgttaccgcttctgcaacagagcgaagtggtgcgcctggatgactgcggcctcactgagatgcgctgcaaagacatcagtagtgcactgcaagccaacccatcgttgaccgaattaagcctgtgtacaaatgagctgggtgatgctggagttcatttagtcctgcagggcttgcagtctcctacctgcaagctgcgtaaactgtccctccagaactgttgtctgacgaagactggttgcggtgtattaccggacatgcttcgttcaatgccctcgctgcgcgaactgtatctgaatgataacccgttgggcgatgcgggcctccagctgctttgctccgggctgttagacccgcaatgtcacctggagaaactgcaggtcgaatactgcaatctcacagcagcctcgtgcgaaagcttggcgagcgctctgcgtgccaaacgccattttaaagaattagcggtttcgaacaacgaactgggtgaagcaggcgtgcgcgtactttgtcgtgggctggtggatagtgcgtgccaactggaggttctgaaactggaaaattgtggattgacctctgcctcctgcgaggatctttgtggtgtggtcgctagcaaaccaagcctccaggaattggaccttggcgataacaaattaggtgaccaaggcatcgcaacgttatgcccgcgcctgcttcacccttcatgccagctgcgtgttttgtggctctgggattgtgatatcaccaccgccggctgccgcgacctctgtcgtgtattacgcgcgaaggaatccctcaaagagatgagtcttgcgggtaatgccttgggagatgaaggcgcacgtctcttgtgcgaatcgttattagaaccggcgtgccagctccagagcctttgggtgaaaagctgttctttcactgctgcttcatgccagcattttagttcgatgttgacgcgcaacacgtgtcttgtcgagctccaattgagcaataataaattaggtgattgtggcgtgcagcagctttgccaagggttatctcaaccaggtgccgccctccaggttttgtggttgggcgactgtgatgtaacgcatagtggctgtgcaagcttagcttccgtgttgcttgtcaaccgttccttacgcgaactcgaccttagtaacaactgcatgggcgaagaagggattctccgtttgatggagagcgttgaacaaccgggatgcgtgcttgaacagttggtcctctatgacatctactggtcggaggagatggataattctttacgtgccttagaaggtcgcaaaccgtcattgcgcgtcattttc

SEQ ID NO: 126 - protein, 468 aa, synthetic construct
  REGION 1..468: note = Variant of RNase inhibitor
MHHHHHHGGSGTMSLDIQCQQLSDARWTELLPLLQQSEVVRLDDCGLTEMRCKDISSALQANPSLTELSLCTNELGDAGVHLVLQGLQSPTCKLRKLSLQNCCLTKTGCGVLPDMLRSMPSLRELYLNDNPLGDAGLQLLCSGLLDPQCHLEKLQVEYCNLTAASCESLASALRAKRHFKELAVSNNELGEAGVRVLCRGLVDSACQLEVLKLENCGLTSASCEDLCGVVASKPSLQELDLGDNKLGDQGIATLCPRLLHPSCQLRVLWLWDCDITTAGCRDLCRVLRAKESLKEMSLAGNALGDEGARLLCESLLEPACQLQSLWVKSCSFTAASCQHFSSMLTRNTCLVELQLSNNKLGDCGVQQLCQGLSQPGAALQVLWLGDCDVTHSGCASLASVLLVNRSLRELDLSNNCMGEEGILRLMESVEQPGCVLEQLVLYDIYWSEEMDNSLRALEGRKPSLRVIF

SEQ ID NO: 127 - DNA, 1404 bp, synthetic construct
  misc_feature 1..1404: note = Variant of RNase inhibitor
  source 1..1404: mol_type = other DNA
atgcaccatcatcatcatcatggcggtagcggcaccatgtctctggatattcagtgtcagcaattgtcagatgcgcgttggacggaactgttaccgcttctgcaacagagcgaagtggtgcgcctggatgactgcggcctcactgagatgcgctgcaaagacatcagtagtgcactgcaagccaacccatcgttgaccgaattaagcctgtgtacaaatgagctgggtgatgctggagttcatttagtcctgcagggcttgcagtctcctacctgcaagattcgtaaactgtccctccagaactgttgtctgacgaagactggttgcggtgtattaccggacatgcttcgttcaatgcccaccctgcgcgaactgtatctgaatgataacccgttgggcgatgcgggcctccagctgctttgctccgggctgttagacccgcaatgtcacctggagaaactgcaggtcgaatactgcaatctcacagcagcctcgtgcgaaagcttggcgagcgctctgcgtgccaaacgccattttaaagaattagcggtttcgaacaacgaactgggtgaagcaggcgtgcgcgtactttgtcgtgggctggtggatagtgcgtgccaactggaggttctgaaactggaaaattgtggattgacctctgcctcctgcgaggatctttgtggtgtggtcgctagcaaaccaagcctccaggaattggaccttggcgataacaaattaggtgaccaaggcatcgcaacgttatgcccgcgcctgcttcacccttcatgccagattcgtgttttgtggctctgggattgtgatatcaccaccgccggctgccgcgacctctgtcgtgtattacgcgcgaaggaatccctcaaagagatgagtcttgcgggtaatgccttgggagatgaaggcgcacgtctcttgtgcgaatcgttattagaaccggcgtgccagctccagagcctttgggtgaaaagctgttctttcactgctgcttcatgccagcattttagttcgatgttgacgcgcaacacgtgtcttgtcgagctccaattgagcaataataaattaggtgattgtggcgtgcagcagctttgccaagggttatctcaaccaggtgccgccctccaggttttgtggttgggcgactgtgatgtagcacatagtggctgtgcaagcttagcttccttgttgcttgtcaaccgttccttacgcgaactcgaccttagtaacaactgcatgggcgaagaagggattctccgtttgatggagagcgttgaacaaccgggatgcgtgcttgaacagttggtcctctatgacatctactggtcggaggagatggataattctttacgtgccttagaaggtcgcaaaccgtcattgcgcgtgattttc

SEQ ID NO: 128 - protein, 468 aa, synthetic construct
  REGION 1..468: note = Variant of RNase inhibitor
MHHHHHHGGSGTMSLDIQCQQLSDARWTELLPLLQQSEVVRLDDCGLTEMRCKDISSALQANPSLTELSLCTNELGDAGVHLVLQGLQSPTCKIRKLSLQNCCLTKTGCGVLPDMLRSMPTLRELYLNDNPLGDAGLQLLCSGLLDPQCHLEKLQVEYCNLTAASCESLASALRAKRHFKELAVSNNELGEAGVRVLCRGLVDSACQLEVLKLENCGLTSASCEDLCGVVASKPSLQELDLGDNKLGDQGIATLCPRLLHPSCQIRVLWLWDCDITTAGCRDLCRVLRAKESLKEMSLAGNALGDEGARLLCESLLEPACQLQSLWVKSCSFTAASCQHFSSMLTRNTCLVELQLSNNKLGDCGVQQLCQGLSQPGAALQVLWLGDCDVAHSGCASLASLLLVNRSLRELDLSNNCMGEEGILRLMESVEQPGCVLEQLVLYDIYWSEEMDNSLRALEGRKPSLRVIF

SEQ ID NO: 129 - DNA, 1404 bp, synthetic construct
  misc_feature 1..1404: note = Variant of RNase inhibitor
  source 1..1404: mol_type = other DNA
atgcaccatcatcatcatcatggcggtagcggcaccatgtctctggatattcagtgtcagcaattgtcagatgcgcgttggacggaactgttaccgcttctgcaacagagcgaagtggtgcgcctggatgactgcggcctcactgagatgcgctgcaaagacatcagtagtgcactgcaagccaacccatcgttgaccgaattaagcctgtgtacaaatgagctgggtgatgctggagttcatttagtcctgcagggcttgcagtctcctacctgcaagattcgtaaactgtccctccagaactgttgtctgacgaagactggttgcggtgtattaccggacatgcttcgttcaatgcccaccctgcgcgaactgtatctgaatgataacccgttgggcgatgcgggcctccagctgctttgctccgggctgttagacccgcaatgtcacctggagaaactgcaggtcgaatactgcaatctcacagcagcctcgtgcgaaagcttggcgagcgctctgcgtgccaaacgccattttaaagaattagcggtttcgaacaacgaactgggtgaagcaggcgtgcgcgtactttgtcgtgggctggtggatagtgcgtgccaactggaggttctgaaactggaaaattgtggattgacctctgcctcctgcgaggatctttgtggtgtggtcgctagcaaaccaagcctccaggaattggaccttggcgataacaaattaggtgaccaaggcatcgcaacgttatgcccgcgcctgcttcacccttcatgccagattcgtgttttgtggctctgggattgtgatatcaccaccgccggctgccgcgacctctgtcgtgtattacgcgcgaaggaatccctcaaagagatgagtcttgcgggtaatgccttgggagatgaaggcgcacgtctcttgtgcgaatcgttattagaaccggcgtgccagctccagagcctttgggtgaaaagctgttctttcactgctgcttcatgccagcattttagttcgatgttgacgcgcaacacgtgtcttgtcgagctccaattgagcaataataaattaggtgattgtggcgtgcagcagctttgccaagggttatctcaaccaggtgccgccctccaggttttgtggttgggcgactgtgatgtagcacatagtggctgtgcaagcttagcttccgtgttgcttgtcaaccgttccttacgcgaactcgaccttagtaacaactgcatgggcgaagaagggattctccgtttgatggagagcgttgaacaaccgggatgcgtgcttgaacagttggtcctctatgacatctactggtcggaggagatggataattggttacgtgccttagaaggtcgcaaaccgtcattgcgcgtgattttc

SEQ ID NO: 130 - protein, 468 aa, synthetic construct
  REGION 1..468: note = Variant of RNase inhibitor
MHHHHHHGGSGTMSLDIQCQQLSDARWTELLPLLQQSEVVRLDDCGLTEMRCKDISSALQANPSLTELSLCTNELGDAGVHLVLQGLQSPTCKIRKLSLQNCCLTKTGCGVLPDMLRSMPTLRELYLNDNPLGDAGLQLLCSGLLDPQCHLEKLQVEYCNLTAASCESLASALRAKRHFKELAVSNNELGEAGVRVLCRGLVDSACQLEVLKLENCGLTSASCEDLCGVVASKPSLQELDLGDNKLGDQGIATLCPRLLHPSCQIRVLWLWDCDITTAGCRDLCRVLRAKESLKEMSLAGNALGDEGARLLCESLLEPACQLQSLWVKSCSFTAASCQHFSSMLTRNTCLVELQLSNNKLGDCGVQQLCQGLSQPGAALQVLWLGDCDVAHSGCASLASVLLVNRSLRELDLSNNCMGEEGILRLMESVEQPGCVLEQLVLYDIYWSEEMDNWLRALEGRKPSLRVIF

SEQ ID NO: 131 - DNA, 1404 bp, synthetic construct
  misc_feature 1..1404: note = Variant of RNase inhibitor
  source 1..1404: mol_type = other DNA
atgcaccatcatcatcatcatggcggtagcggcaccatgtctctggatattcagtgtcagcaattgtcagatgcgcgttggacggaactgttaccgcttctgcaacagagcgaagtggtgcgcctggatgactgcggcctcactgagatgcgctgcaaagacatcagtagtgcactgcaagccaacccatcgttgaccgaattaagcctgtgtacaaatgagctgggtgatgctggagttcatttagtcctgcagggcttgcagtctcctacctgcaagattcgtaaactgtccctccagaactgttgtctgacgaagactggttgcggtgtattaccggacatgcttcgttcaatgcccaccctgcgcgaactgtatctgaatgataacccgttgggcgatgcgggcctccagctgctttgctccgggctgttagacccgcaatgtcacctggagaaactgcaggtcgaatactgcaatctcacagcagcctcgtgcgaaagcttggcgagcgctctgcgtgccaaacgccattttaaagaattagcggtttcgaacaacgaactgggtgaagcaggcgtgcgcgtactttgtcgtgggctggtggatagtgcgtgccaactggaggttctgaaactggaaaattgtggattgacctctgcctcctgcgaggatctttgtggtgtggtcgctagcaaaccaagcctccaggaattggaccttggcgataacaaattaggtgaccaaggcatcgcaacgttatgcccgcgcctgcttcacccttcatgccagattcgtgttttgtggctctgggattgtgatatcaccaccgccggctgccgcgacctctgtcgtgtattacgcgcgaaggaatccctcaaagagatgagtcttgcgggtaatgccttgggagatgaaggcgcacgtctcttgtgcgaatcgttattagaaccggcgtgccagctccagagcctttgggtgaaaagctgttctttcactgctgcttcatgccagcattttagttcgatgttgacgcgcaacacgtgtcttaaggagctccaattgagcaataataaattaggtgattgtggcgtgcagcagctttgccaagggttatctcaaccaggtgccgccctccaggttttgtggttgggcgactgtgatgtagcacatagtggctgtgcaagcttagcttccgtgttgcttgtcaaccgttccttacgcgaactcgaccttagtaacaactgcatgggcgaagaagggattctccgtttgatggagagcgttgaacaaccgggatgcgtgcttgaacagttggtcctctatgacatctactggtcggaggagatggataattctttacgtgccttagaaggtcgcaaaccgtcattgcgcgtgattttc

SEQ ID NO: 132 - protein, 468 aa, synthetic construct
  REGION 1..468: note = Variant of RNase inhibitor
MHHHHHHGGSGTMSLDIQCQQLSDARWTELLPLLQQSEVVRLDDCGLTEMRCKDISSALQANPSLTELSLCTNELGDAGVHLVLQGLQSPTCKIRKLSLQNCCLTKTGCGVLPDMLRSMPTLRELYLNDNPLGDAGLQLLCSGLLDPQCHLEKLQVEYCNLTAASCESLASALRAKRHFKELAVSNNELGEAGVRVLCRGLVDSACQLEVLKLENCGLTSASCEDLCGVVASKPSLQELDLGDNKLGDQGIATLCPRLLHPSCQIRVLWLWDCDITTAGCRDLCRVLRAKESLKEMSLAGNALGDEGARLLCESLLEPACQLQSLWVKSCSFTAASCQHFSSMLTRNTCLKELQLSNNKLGDCGVQQLCQGLSQPGAALQVLWLGDCDVAHSGCASLASVLLVNRSLRELDLSNNCMGEEGILRLMESVEQPGCVLEQLVLYDIYWSEEMDNSLRALEGRKPSLRVIF

SEQ ID NO: 133 - DNA, 1404 bp, synthetic construct
  misc_feature 1..1404: note = Variant of RNase inhibitor
  source 1..1404: mol_type = other DNA
atgcaccatcatcatcatcatggcggtagcggcaccatgtctctggatattcagtgtcagcaattgtcagatgcgcgttggacggaactgttaccgcttctgcaacagagcgaagtggtgcgcctggatgactgcggcctcactgagatgcgctgcaaagacatcagtagtgcactgcaagccaacccatcgttgaccgaattaagcctgtgtacaaatgagctgggtgatgctggagttcatttagtgctgcagggcttgcagtctcctacctgcaagattcgtaaactgtccctccagaactgttgtctgacgaagacgggttgcggtgtattaccggacatgcttcgttcaatgcccaccctgcgcgaactgtatctgaatgataacccgttgggcgatgcgggcctccagctgctttgctccgggctgttagacccgcaatgtcacctggagaaactgcaggtcgaatactgcaatctcacagcagcctcgtgcgaaagcttggcgagcgctctgcgtgccaaacgccattttaaagaattagcggtttcgaacaacgaactgggtgaagcaggcgtgcgcgtactttgtcgtgggctggtggatagtgcgtgccaactggaggttctgaaactggaaaattgtggattgacctctgcctcctgcgaggatctttgtggtgtggtggctagcaaaccaagcctccaggaattggaccttggcgataacaaattaggtgaccaaggcatcgcaacgttatgcccgcgcctgcttcacccttcatgccagattcgtgttttgtggctctgggattgtgatatcaccaccgccggctgccgcgacctctgtcgtgtattacgcgcgaaggaatccctcaaagagatgagtcttgcgggtaatgccttgggagatgaaggcgcacgtctcttgtgcgaatcgttattagaaccggcgtgccagctccaaagcctttgggtgaaaagctgttctttcactgctgcttcatgccagcattttagttcgatgttgacgcgcaacacgtgtcttgtcgagctccaattgagcaataataaattaggtgattgtggcgtgcagcagctttgccaagggttatctcaaccaggtgccgccctccaggttttgtggttgggcgactgtgatgtagcacatagtggctgtgcaagcttagcttccgtgttgcttgtcaaccgttccttacgcgaactcgaccttagtaacaactgcatgggcgaagaagggattctccgtttgatggagagcctggaacaaccgggatgcgtgcttgaacagttggtcctctatgacatctactggtcggaggagatggataattctttacgtgccttagaaggtcgcaaaccgtcattgcgcgtgattttc

SEQ ID NO: 134 - protein, 468 aa, synthetic construct
  REGION 1..468: note = Variant of RNase inhibitor
MHHHHHHGGSGTMSLDIQCQQLSDARWTELLPLLQQSEVVRLDDCGLTEMRCKDISSALQANPSLTELSLCTNELGDAGVHLVLQGLQSPTCKIRKLSLQNCCLTKTGCGVLPDMLRSMPTLRELYLNDNPLGDAGLQLLCSGLLDPQCHLEKLQVEYCNLTAASCESLASALRAKRHFKELAVSNNELGEAGVRVLCRGLVDSACQLEVLKLENCGLTSASCEDLCGVVASKPSLQELDLGDNKLGDQGIATLCPRLLHPSCQIRVLWLWDCDITTAGCRDLCRVLRAKESLKEMSLAGNALGDEGARLLCESLLEPACQLQSLWVKSCSFTAASCQHFSSMLTRNTCLVELQLSNNKLGDCGVQQLCQGLSQPGAALQVLWLGDCDVAHSGCASLASVLLVNRSLRELDLSNNCMGEEGILRLMESLEQPGCVLEQLVLYDIYWSEEMDNSLRALEGRKPSLRVIF

SEQ ID NO: 135 - DNA, 1404 bp, synthetic construct
  misc_feature 1..1404: note = Variant of RNase inhibitor
  source 1..1404: mol_type = other DNA
atgcaccatcatcatcatcatggcggtagcggcaccatgtctctggatattcagtgtcagcaattgtcagatgcgcgttggacggaactgttaccgcttctgcaacagagcgaagtggtgcgcctggatgactgcggcctcactgagatgcgctgcaaagacatcagtagtgcactgcaagccaacccatcgttgaccgaattaagcctgtgtacaaatgagctgggtgatgctggagttcatttagtcctgcagggcttgcagtctcctacctgcaagattcgtaaactgtccctccagaactgttgtctgacgaagactggttgcggtgtattaccggacatgcttcgttcaatgcccaccctgcgcgaactgtatctgaatgataacccgttgggcgatgcgggcctccagctgctttgctccgggctgttagacccgcaatgtcacctggagaaactgcaggtggaatactgcaatctcacagcagcctcgtgcgaaagcttggcgagcgctctgcgtgccaaacgccattttaaagaattagcggtttcgaacaacgaactgggtgaagcaggcgtgcgcgtactttgtcgtgggctggtggatagtgcgtgccaactggaggttctgaaactggaaaattgtggattgacctctgcctcctgcgaggatctttgtggtgtggtcgctagcaaaccaagcctccaggaattggaccttggcgataacaaattaggtgaccaaggcatcgcaacgttatgcccgtttctgcttcacccttcatgccagattcgtgttttgtggctctgggattgtgatatcaccaccgccggctgccgcgacctctgtcgtgtattacgcgcgaaggaatccctcaaagagattagtcttgcgggtaatgccttgggagatgaaggcgcacgtctcttgtgcgaatcgttattagaaccggcgtgccagctccagagcctttgggtgaaaagctgttctttcactgctgcttcatgccagcattttagttcgatgttgacgcgcaacacgtgtcttgtcgagctccaattgagcaataataaattaggtgattgtggcgtgcagcagctttgccaagggttatctcaaccaggtgccgccctccaggttttgtggttgggcgactgtgatgtagcacatagtggctgtgcaagcttagcttccgtgttgcttgtcaaccgttccttacgcgaactcgaccttagtaacaactgcatgggcgaagaagggattctccgtttgatggagagcgttgaacaaccgggatgcgtgcttgaacagttggtcctctatgacatctactggtcggaggagatggataattctttacgtgccttagaaggtcgcaaaccgtcattgcgcgtgattttc

SEQ ID NO: 136 - protein, 468 aa, synthetic construct
  REGION 1..468: note = Variant of RNase inhibitor
MHHHHHHGGSGTMSLDIQCQQLSDARWTELLPLLQQSEVVRLDDCGLTEMRCKDISSALQANPSLTELSLCTNELGDAGVHLVLQGLQSPTCKIRKLSLQNCCLTKTGCGVLPDMLRSMPTLRELYLNDNPLGDAGLQLLCSGLLDPQCHLEKLQVEYCNLTAASCESLASALRAKRHFKELAVSNNELGEAGVRVLCRGLVDSACQLEVLKLENCGLTSASCEDLCGVVASKPSLQELDLGDNKLGDQGIATLCPFLLHPSCQIRVLWLWDCDITTAGCRDLCRVLRAKESLKEISLAGNALGDEGARLLCESLLEPACQLQSLWVKSCSFTAASCQHFSSMLTRNTCLVELQLSNNKLGDCGVQQLCQGLSQPGAALQVLWLGDCDVAHSGCASLASVLLVNRSLRELDLSNNCMGEEGILRLMESVEQPGCVLEQLVLYDIYWSEEMDNSLRALEGRKPSLRVIF

SEQ ID NO: 137 - DNA, 1404 bp, synthetic construct
  misc_feature 1..1404: note = Variant of RNase inhibitor
  source 1..1404: mol_type = other DNA
atgcaccatcatcatcatcatggcggtagcggcaccatgtctctggatattcagtgtcagcaattgtcagatgcgcgttggacggaactgttaccgcttctgcaacagagcgaagtggtgcgcctggatgactgcggcctcactgagatgcgctgcaaagacatcagtagtgcactgcaagccaacccatcgttgaccgaattaagcctgtgtacaaatgagctgggtgatgctggagttcatttagtcctgcagggcttgcagtctcctacctgcaagattcgtaaactgtccctccagaactgttgtctgacgaagactggttgcggtgtattaccggacatgcttcgttcaatgcccaccctgcgcgaactgtatctgaatgataacccgttgggcgatgcgggcctccagctgctttgctccgggctgttagacccgcaatgtcacctggagaaactgcaggtcgaatactgcaatctcacagcagcctcgtgcgaaagcttggcgagcgctctgcgtgccaaacgccattttaaagaattagcggtttcgaacaacgaactgggtgaagcaggcgtgcgcgtactttgtcgtgggctggtggatagtgcgtgccaactggaggttctgaaactggaaaattgtggattgacctctgcctcctgcgaggatctttgtggtgtggtcgctagcaaaccaagcctccaggaattggaccttggcgataacaaattaggtgaccaaggcatcgcaacgttatgcccgcgcctgcttcacccttcatgccagattcgtgttttgtggctctgggattgtgatatcaccaccgccggctgccgcgacctctgtcgtgtattacgcgcgaaggaatccctcaaagagatgagtcttgcgggtaatgccttgggagatgaaggcgcacgtctcttgtgcgaatcgttattagaaccggcgtgccagctccagagcctttgggtgaaaagctgttctttcactgctgcttcatgccagcattttagttcgatgttgacgcgcaacacgtgtcttgtcgagctccaattgagcaataataaattaggtgattgtggcgtgcagcagctttgccaagggttatctcaaccaggtgccgccctccaggttttgtggttgggcgactgtgatgtagcacatagtggctgtattagcttagcttccgtgttgcttgtcaaccgttccttacgcgaactcgaccttagtaacaactgcatgggcgaagaagggattctccgtttgatggagagcgttgaacaaccgggatgcgtgcttgaacagttggtcctctatgacatctactggtcggaggagatggataattctttacgtgccttagaaggtcgcaaaccgtcattgcgcgtgattttc

SEQ ID NO: 138 - protein, 468 aa, synthetic construct
  REGION 1..468: note = Variant of RNase inhibitor
MHHHHHHGGSGTMSLDIQCQQLSDARWTELLPLLQQSEVVRLDDCGLTEMRCKDISSALQANPSLTELSLCTNELGDAGVHLVLQGLQSPTCKIRKLSLQNCCLTKTGCGVLPDMLRSMPTLRELYLNDNPLGDAGLQLLCSGLLDPQCHLEKLQVEYCNLTAASCESLASALRAKRHFKELAVSNNELGEAGVRVLCRGLVDSACQLEVLKLENCGLTSASCEDLCGVVASKPSLQELDLGDNKLGDQGIATLCPRLLHPSCQIRVLWLWDCDITTAGCRDLCRVLRAKESLKEMSLAGNALGDEGARLLCESLLEPACQLQSLWVKSCSFTAASCQHFSSMLTRNTCLVELQLSNNKLGDCGVQQLCQGLSQPGAALQVLWLGDCDVAHSGCISLASVLLVNRSLRELDLSNNCMGEEGILRLMESVEQPGCVLEQLVLYDIYWSEEMDNSLRALEGRKPSLRVIF

SEQ ID NO: 139 - DNA, 1404 bp, synthetic construct
  misc_feature 1..1404: note = Variant of RNase inhibitor
  source 1..1404: mol_type = other DNA
atgcaccatcatcatcatcatggcggtagcggcaccatgtctctggatattcagtgtcagcaattgtcagatgcgcgttggacggaactgttaccgcttctgcaacagagcgaagtggtgcgcctggatgactgcggcctcactgagatgcgctgcaaagacatcagtagtgcactgcaagccaacccatcgttgaccgaattaagcctgtgtacaaatgagctgggtgatgctggagttcatttagtcctgcagggcttgcagtctcctacctgcaagattcgtaaactgtccctccagaactgttgtctgacgaagactggttgcggtgtattaccggacatgcttcgttcaatgcccaccctgcgcgaactgtatctgaatgataacccgttgggcgatgcgggcctccagctgctttgctccgggctgttagacccgcaatgtcacctggagaaactgcaggtcgaatactgcaatctcacagcagcctcgtgcgaaagcttggcgagcgctctgcgtgccaaacgccattttaaagaattagcggtttcgaacaacgaactgggtgaagcaggcgtgcgcgtactttgtcgtgggctggtggatagtgcgtgccaactggaggttctgaaactggaaaattgtggattgacctctgcctcctgcgaggatctttgtggtgtggtcgctagcaaaccaagcctccaggaattggaccttggcgataacaaattaggtgaccaaggcatcgcaacgttatgcccgcgcctgcttcacccttcatgccagattcgtgttttgtggctctgggattgtgatatcaccaccgccggctgccgcgacctctgtcgtgtattacgcgcgaaggaatccctcaaagagatgagtcttgcgggtaatgccttgggagatgaaggcgcacgtctcttgtgcgaatcgttattagaaccggcgtgccagctccagagcctttgggtgaaaagctgttctttcactgctgcttcatgccagcattttagttcgatgttgacgcgcaacacgtgtcttgtcgagctccaattgagcaataataaattaggtgattgtggcgtgcagcagctttgccaagggttatctcaaccaggtgccgccctccaggttttgtggttgggcgactgtgatgtagcacatagtggctgtgcaagcttagcttccgtgttgcttgtcaaccgttccttacgcgaactcgaccttagtaacaactgcatgggcgaagaagggattctccgtttgatggagagcgttgaacaaccgggatgcgtgcttgaacagttggtcctctatgacatctactggtcggaggagatggataattctttacgtgccttagaaatgcgcaaaccgtcattgcgcgtgattttc

SEQ ID NO: 140 - protein, 468 aa, synthetic construct
  REGION 1..468: note = Variant of RNase inhibitor
MHHHHHHGGSGTMSLDIQCQQLSDARWTELLPLLQQSEVVRLDDCGLTEMRCKDISSALQANPSLTELSLCTNELGDAGVHLVLQGLQSPTCKIRKLSLQNCCLTKTGCGVLPDMLRSMPTLRELYLNDNPLGDAGLQLLCSGLLDPQCHLEKLQVEYCNLTAASCESLASALRAKRHFKELAVSNNELGEAGVRVLCRGLVDSACQLEVLKLENCGLTSASCEDLCGVVASKPSLQELDLGDNKLGDQGIATLCPRLLHPSCQIRVLWLWDCDITTAGCRDLCRVLRAKESLKEMSLAGNALGDEGARLLCESLLEPACQLQSLWVKSCSFTAASCQHFSSMLTRNTCLVELQLSNNKLGDCGVQQLCQGLSQPGAALQVLWLGDCDVAHSGCASLASVLLVNRSLRELDLSNNCMGEEGILRLMESVEQPGCVLEQLVLYDIYWSEEMDNSLRALEMRKPSLRVIF

SEQ ID NO: 141 - DNA, 1404 bp, synthetic construct
  misc_feature 1..1404: note = Variant of RNase inhibitor
  source 1..1404: mol_type = other DNA
atgcaccatcatcatcatcatggcggtagcggcaccatgtctctggatattcagtgtcagcaattgtcagatgcgcgttggacggaactgttaccgcttctgcaacagagcgaagtggtgcgcctggatgactgcggcctcactgagatgcgctgcaaagacatcagtagtgcactgcaagccaacccatcgttgaccgaattaagcctgtgtacaaatgagctgggtgatgctggagtttttttagtcctgcagggcttgcagtctcctacctgcaagattcgtaaactgtccctccagaactgttgtctgacgaagactggttgcggtgtattaccggacatgcttcgttcaatgcccaccctgcgcgaactgtatctgaatgataacccgttgggcgatgcgggcctccagctgctttgctccgggctgttagacccgcaatgtcacctggagaaactgcaggtcgaatactgcaatctcacagcagcctcgtgcgaaagcttggcgagcgctctgcgtgccaaacgccattttaaagaattagcggtttcgaacaacgaactgggtgaagcaggcgtgcgcgtactttgtcgtgggctggtggatagtgcgtgccaactggaggttctgaaactggaaaattgtggattgacctctgcctcctgcgaggatctttgtggtgtggtcgctagcaaaccaagcctccaggaattggaccttggcgataacaaattaggtgaccaaggcatcgcaacgttatgcccgcgcctgcttcacccttcatgccagattcgtgttttgtggctctgggattgtgatatcaccaccgccggctgccgcgacctctgtcgtgtattacgcgcgaaggaatccctcaaagagatgagtcttgcgggtaatgccttgggagatgaaggcgcacgtctcttgtgcgaatcgttattagaaccggcgtgccagctccagagcctttgggtgaaaagctgttctttcactgctgcttcatgccagcattttagttcgatgttgacgcgcaacacgtgtcttgtcgagctccaattgagcaataataaattaggtgattgtggcgtgcagcagctttgccaagggttatctcaaccaggtgccgccctccaggttttgtggttgggcgactgtgatgtagcacatagtggctgtgcaagcttagcttccgtgttgcttgtcaaccgttccttacgcgaactcgaccttagtaacaactgcatgggcgaagaagggattctccgtttgatggagagcgttgaacaaccgggatgcgtgcttgaacagttggtcctctatgacatctactggtcggaggagatggataattctttacgtgccttagaaggtcgcaaaccgtcattgcgcgtgattttc

SEQ ID NO: 142 - protein, 468 aa, synthetic construct
  REGION 1..468: note = Variant of RNase inhibitor
MHHHHHHGGSGTMSLDIQCQQLSDARWTELLPLLQQSEVVRLDDCGLTEMRCKDISSALQANPSLTELSLCTNELGDAGVFLVLQGLQSPTCKIRKLSLQNCCLTKTGCGVLPDMLRSMPTLRELYLNDNPLGDAGLQLLCSGLLDPQCHLEKLQVEYCNLTAASCESLASALRAKRHFKELAVSNNELGEAGVRVLCRGLVDSACQLEVLKLENCGLTSASCEDLCGVVASKPSLQELDLGDNKLGDQGIATLCPRLLHPSCQIRVLWLWDCDITTAGCRDLCRVLRAKESLKEMSLAGNALGDEGARLLCESLLEPACQLQSLWVKSCSFTAASCQHFSSMLTRNTCLVELQLSNNKLGDCGVQQLCQGLSQPGAALQVLWLGDCDVAHSGCASLASVLLVNRSLRELDLSNNCMGEEGILRLMESVEQPGCVLEQLVLYDIYWSEEMDNSLRALEGRKPSLRVIF

SEQ ID NO: 143 - DNA, 1404 bp, synthetic construct
  misc_feature 1..1404: note = Variant of RNase inhibitor
  source 1..1404: mol_type = other DNA
atgcaccatcatcatcatcatggcggtagcggcaccatgtctctggatattcagtgtcaacaattgtcagatgcgcgttggacggaactgttaccgcttctgcaacagagcgaagtggtgcgcctggatgactgcggcctcactgagatgcgctgcaaagacatcagtagtgcactgcaagccaacccatcgttgaccgaattaagcctgtgtacaaatgagctgggtgatgctggagttcatttagtcctgcagggcttgcagtctcctacctgcaagattgaaaaactgtccctccagaactgttgtctgacgaagactggttgcggtgtattaccggacatgcttcgttcaatgcccaccctgcgcgaactgtatctgaatgataacccgttgggcgatgcgggcctccagctgctttgctccgggctgttagacccgcaatgtcacctggagaaactgcaggtggaatactgcaatctcacagcagcctcgtgcgaaagcttggcgagcgctctgcgtgccaaacgccattttaaagaattagcggtttcgaacaacgaactgggtgaagcaggcgtgcgcgtactttgtcgtgggctggtggatagtgcgtgccaactggaggttctgaaactggaaaattgtggattgacctctgcctcctgcgaggatctttgtggtgtggtcgctagcaaaccaagcctccaggaattggaccttggcgataacaaattaggtgaccaaggcatcgcaacgttatgcccgcgcctgcttcacccttcatgccagattcgtgttttgtggctctgggattgtgatatcaccaccgccggctgccgcgacctctgtcgtgtattacgcgcgaaggaatccctcaaagagctgagtcttgcgggtaatgccttgggagatgaaggcgcacgtctcttgtgcgaatcgttattagaaccggcgtgccagctcgaaagcctttgggtgaaaagctgttctttcactgctgcttcatgccagcattttagttcgatgttgacgcgcaacacgtgtcttgtcgagctccaattgagcaataataaattaggtgattgtggcgtgcagcagctttgccaagggttatctcaaccaggtgccgccctccaggttttgtggttgggcgactgtgatgtatcgcatagtggctgtgcaagcttagcttccgtgttgcttgtcaaccgttccttacgcgaactcgaccttagtaacaactgcatgggcgaagaagggattctccgtttgatggagagcctggaacaaccgggatgcgtgcttgaacagttggtcctctatgacatctactggtcggaggagatggataattctttacgtgccttagaagagcgcaaaccgtcattgcgcgtgattttc

SEQ ID NO: 144 - protein, 468 aa, synthetic construct
  REGION 1..468: note = Variant of RNase inhibitor
MHHHHHHGGSGTMSLDIQCQQLSDARWTELLPLLQQSEVVRLDDCGLTEMRCKDISSALQANPSLTELSLCTNELGDAGVHLVLQGLQSPTCKIEKLSLQNCCLTKTGCGVLPDMLRSMPTLRELYLNDNPLGDAGLQLLCSGLLDPQCHLEKLQVEYCNLTAASCESLASALRAKRHFKELAVSNNELGEAGVRVLCRGLVDSACQLEVLKLENCGLTSASCEDLCGVVASKPSLQELDLGDNKLGDQGIATLCPRLLHPSCQIRVLWLWDCDITTAGCRDLCRVLRAKESLKELSLAGNALGDEGARLLCESLLEPACQLESLWVKSCSFTAASCQHFSSMLTRNTCLVELQLSNNKLGDCGVQQLCQGLSQPGAALQVLWLGDCDVSHSGCASLASVLLVNRSLRELDLSNNCMGEEGILRLMESLEQPGCVLEQLVLYDIYWSEEMDNSLRALEERKPSLRVIF

SEQ ID NO: 145 - DNA, 1404 bp, synthetic construct
  misc_feature 1..1404: note = Variant of RNase inhibitor
  source 1..1404: mol_type = other DNA
atgcaccatcatcatcatcatggcggtagcggcaccatgtctctggatattcagtgtcaacaattgtcagatgcgcgttggacggaactgttaccgcttctgcaacagagcgaagtggtgcgcctggatgactgcggcctcactgagatgcgctgcaaagacatcagtagtgcactgcaagccaacccatcgttgaccgaattaagcctgtgtacaaatgagctgggtgatgctggagttcatttagtcctgcagggcttgcagtctcctacctgcaagattgaaaaactgtccctccagaactgttgtctgacgaagactggttgcggtgtattaccggacatgcttcgttcaatgcccaccctgcgcgaactgtatctgaatgataacccgttgggcgatgcgggcctccagctgctttgctccgggctgttagacccgcaatgtcacctggagaaactgcaggtggaatactgcaatctcacagcagcctcgtgcgaaagcttggcgagcgctctgcgtgccaaacgccattttaaagaattagcggtttcgaacaacgaactgggtgaagcaggcgtgcgcgtactttgtcgtgggctggtggatagtgcgtgccaactggaggttctgaaactggaaaattgtggattgacctctgcctcctgcgaggatctttgtggtgtggtcgctagcaaaccaagcctccaggaattggaccttggcgataacaaattaggtgaccaaggcatcgcaacgttatgcccgtttctgcttcacccttcatgccagattcgtgttttgtggctctgggattgtgatatcaccaccgccggctgccgcgacctctgtcgtgtattacgcgcgaaggaatccctcaaagagctgagtcttgcgggtaatgccttgggagatgaaggcgcacgtctcttgtgcgaatcgttattagaaccggcgtgccagctcgaaagcctttgggtgaaaagctgttctttcactgctgcttcatgccagcattttagttcgatgttgacgcgcaacacgtgtcttgtcgagctccaattgagcaataataaattaggtgattgtggcgtgcagcagctttgccaagggttatctcaaccaggtgccgccctccaggttttgtggttgggcgactgtgatgtagcgcatagtggctgtgcaagcttagcttccgtgttgcttgtcaaccgttccttacgcgaactcgaccttagtaacaactgcatgggcgaagaagggattctccgtttgatggagagcctggaacaaccgggatgcgtgcttgaacagttggtcctctatgacatctactggtcggaggagatggataattctttacgtgccttagaagagcgcaaaccgtcattgcgcgtgattttc

SEQ ID NO: 146 - protein, 468 aa, synthetic construct
  REGION 1..468: note = Variant of RNase inhibitor
MHHHHHHGGSGTMSLDIQCQQLSDARWTELLPLLQQSEVVRLDDCGLTEMRCKDISSALQANPSLTELSLCTNELGDAGVHLVLQGLQSPTCKIEKLSLQNCCLTKTGCGVLPDMLRSMPTLRELYLNDNPLGDAGLQLLCSGLLDPQCHLEKLQVEYCNLTAASCESLASALRAKRHFKELAVSNNELGEAGVRVLCRGLVDSACQLEVLKLENCGLTSASCEDLCGVVASKPSLQELDLGDNKLGDQGIATLCPFLLHPSCQIRVLWLWDCDITTAGCRDLCRVLRAKESLKELSLAGNALGDEGARLLCESLLEPACQLESLWVKSCSFTAASCQHFSSMLTRNTCLVELQLSNNKLGDCGVQQLCQGLSQPGAALQVLWLGDCDVAHSGCASLASVLLVNRSLRELDLSNNCMGEEGILRLMESLEQPGCVLEQLVLYDIYWSEEMDNSLRALEERKPSLRVIF

SEQ ID NO: 147 - DNA, 1404 bp, synthetic construct
  misc_feature 1..1404: note = Variant of RNase inhibitor
  source 1..1404: mol_type = other DNA
atgcaccatcatcatcatcatggcggtagcggcaccatgtctctggatattcagtgtcaacaattgtcagatgcgcgttggacggaactgttaccgcttctgcaacagagcgaagtggtgcgcctggatgactgcggcctcactgagatgcgctgcaaagacatcagtagtgcactgcaagccaacccatcgttgaccgaattaagcctgtgtacaaatgagctgggtgatgctggagttcatttagtcctgcagggcttgcagtctcctacctgcaagattgaaaaactgtccctccagaactgttgtctgacgaagactggttgcggtgtattaccggacatgcttcgttcaatgcccaccctgcgcgaactgtatctgaatgataacccgttgggcgatgcgggcctccagctgctttgctccgggctgttagacccgcaatgtcacctggagaaactgcaggtggaatactgcaatctcacagcagcctcgtgcgaaagcttggcgagcgctctgcgtgccaaacgccattttaaagaattagcggtttcgaacaacgaactgggtgaagcaggcgtgcgcgtactttgtcgtgggctggtggatagtgcgtgccaactggaggttctgaaactggaaaattgtggattgacctctgcctcctgcgaggatctttgtggtgtggtcgctagcaaaccaagcctccaggaattggaccttggcgataacaaattaggtgaccaaggcatcgcaacgttatgcccgtttctgcttcacccttcatgccagattcgtgttttgtggctctgggattgtgatatcaccaccgccggctgccgcgacctctgtcgtgtattacgcgcgaaggaatccctcaaagagctgagtcttgcgggtaatgccttgggagatgaaggcgcacgtctcttgtgcgaatcgttattagaaccggcgtgccagctccaaagcctttgggtgaaaagctgttctttcactgctgcttcatgccagcattttagttcgatgttgacgcgcaacacgtgtcttgtcgagctccaattgagcaataataaattaggtgattgtggcgtgcagcagctttgccaagggttatctcaaccaggtgcggccctccaggttttgtggttgggcgactgtgatgtatcgcatagtggctgtgcaagcttagcttccgtgttgcttgtcaaccgttccttacgcgaactcgaccttagtaacaactgcatgggcgaagaagggattctccgtttgatggagagcgtggaacaaccgggatgcgtgcttgaacagttggtcctctatgacatctactggtcggaggagatggataattctttacgtgccttagaagagcgcaaaccgtcattgcgcgtgattttc

SEQ ID NO: 148 - protein, 468 aa, synthetic construct
  REGION 1..468: note = Variant of RNase inhibitor
MHHHHHHGGSGTMSLDIQCQQLSDARWTELLPLLQQSEVVRLDDCGLTEMRCKDISSALQANPSLTELSLCTNELGDAGVHLVLQGLQSPTCKIEKLSLQNCCLTKTGCGVLPDMLRSMPTLRELYLNDNPLGDAGLQLLCSGLLDPQCHLEKLQVEYCNLTAASCESLASALRAKRHFKELAVSNNELGEAGVRVLCRGLVDSACQLEVLKLENCGLTSASCEDLCGVVASKPSLQELDLGDNKLGDQGIATLCPFLLHPSCQIRVLWLWDCDITTAGCRDLCRVLRAKESLKELSLAGNALGDEGARLLCESLLEPACQLQSLWVKSCSFTAASCQHFSSMLTRNTCLVELQLSNNKLGDCGVQQLCQGLSQPGAALQVLWLGDCDVSHSGCASLASVLLVNRSLRELDLSNNCMGEEGILRLMESVEQPGCVLEQLVLYDIYWSEEMDNSLRALEERKPSLRVIF

SEQ ID NO: 149 - DNA, 1404 bp, synthetic construct
  misc_feature 1..1404: note = Variant of RNase inhibitor
  source 1..1404: mol_type = other DNA
atgcaccatcatcatcatcatggcggtagcggcaccatgtctctggatattcagtgtcaacaattgtcagatgcgcgttggacggaactgttaccgcttctgcaacagagcgaagtggtgcgcctggatgactgcggcctcactgagatgcgctgcaaagacatcagtagtgcactgcaagccaacccatcgttgaccgaattaagcctgtgtacaaatgagctgggtgatgctggagttcatttagtcctgcagggcttgcagtctcctacctgcaagattgaaaaactgtccctccagaactgttgtctgacgaagactggttgcggtgtattaccggacatgcttcgttcaatgcccaccctgcgcgaactgtatctgaatgataacccgttgggcgatgcgggcctccagctgctttgctccgggctgttagacccgcaatgtcacctggagaaactgcaggtggaatactgcaatctcacagcagcctcgtgcgaaagcttggcgagcgctctgcgtgccaaacgccattttaaagaattagcggtttcgaacaacgaactgggtgaagcaggcgtgcgcgtactttgtcgtgggctggtggatagtgcgtgccaactggaggttctgaaactggaaaattgtggattgacctctgcctcctgcgaggatctttgtggtgtggtcgctagcaaaccaagcctccaggaattggaccttggcgataacaaattaggtgaccaaggcatcgcaacgttatgcccgtttctgcttcacccttcatgccagattcgtgttttgtggctctgggattgtgatatcaccaccgccggctgccgcgacctctgtcgtgtattacgcgcgaaggaatccctcaaagagctgagtcttgcgggtaatgccttgggagatgaaggcgcacgtctcttgtgcgaatcgttattagaaccggcgtgccagctcgaaagcctttgggtgaaaagctgttctttcactgctgcttcatgccagcattttagttcgatgttgacgcgcaacacgtgtcttgtcgagctccaattgagcaataataaattaggtgattgtggcgtgcagcagctttgccaagggttatctcaaccaggtgccgccctccaggttttgtggttgggcgactgtgatgtaacgcatagtggctgtgcaagcttagcttccgtgttgcttgtcaaccgttccttacgcgaactcgaccttagtaacaactgcatgggcgaagaagggattctccgtttgatggagagcgttgaacaaccgggatgcgtgcttgaacagttggtcctctatgacatctactggtcggaggagatggataattctttacgtgccttagaagagcgcaaaccgtcattgcgcgtgattttc

SEQ ID NO: 150 - protein, 468 aa, synthetic construct
  REGION 1..468: note = Variant of RNase inhibitor
MHHHHHHGGSGTMSLDIQCQQLSDARWTELLPLLQQSEVVRLDDCGLTEMRCKDISSALQANPSLTELSLCTNELGDAGVHLVLQGLQSPTCKIEKLSLQNCCLTKTGCGVLPDMLRSMPTLRELYLNDNPLGDAGLQLLCSGLLDPQCHLEKLQVEYCNLTAASCESLASALRAKRHFKELAVSNNELGEAGVRVLCRGLVDSACQLEVLKLENCGLTSASCEDLCGVVASKPSLQELDLGDNKLGDQGIATLCPFLLHPSCQIRVLWLWDCDITTAGCRDLCRVLRAKESLKELSLAGNALGDEGARLLCESLLEPACQLESLWVKSCSFTAASCQHFSSMLTRNTCLVELQLSNNKLGDCGVQQLCQGLSQPGAALQVLWLGDCDVTHSGCASLASVLLVNRSLRELDLSNNCMGEEGILRLMESVEQPGCVLEQLVLYDIYWSEEMDNSLRALEERKPSLRVIF

SEQ ID NO: 151 - DNA, 1404 bp, synthetic construct
  misc_feature 1..1404: note = Variant of RNase inhibitor
  source 1..1404: mol_type = other DNA
atgcaccatcatcatcatcatggcggtagcggcaccatgtctctggatattcagtgtcaacaattgtcagatgcgcgttggacggaactgttaccgcttctgcaacagagcgaagtggtgcgcctggatgactgcggcctcactgagatgcgctgcaaagacatcagtagtgcactgcaagccaacccatcgttgaccgaattaagcctgtgtacaaatgagctgggtgatgctggagttcatttagtcctgcagggcttgcagtctcctacctgcaagattgaaaaactgtccctccagaactgttgtctgacgaagactggttgcggtgtattaccggacatgcttcgttcaatgcccaccctgcgcgaactgtatctgaatgataacccgttgggcgatgcgggcctccagctgctttgctccgggctgttagacccgcaatgtcacctggagaaactgcaggtggaatactgcaatctcacagcagcctcgtgcgaaagcttggcgagcgctctgcgtgccaaacgccattttaaagaattagcggtttcgaacaacgaactgggtgaagcaggcgtgcgcgtactttgtcgtgggctggtggatagtgcgtgccaactggaggttctgaaactggaaaattgtggattgacctctgcctcctgcgaggatctttgtggtgtggtcgctagcaaaccaagcctccaggaattggaccttggcgataacaaattaggtgaccaaggcatcgcaacgttatgcccgtttctgcttcacccttcatgccagattcgtgttttgtggctctgggattgtgatatcaccaccgccggctgccgcgacctctgtcgtgtattacgcgcgaaggaatccctcaaagagctgagtcttgcgggtaatgccttgggagatgaaggcgcacgtctcttgtgcgaatcgttattagaaccggcgtgccagctcgaaagcctttgggtgaaaagctgttctttcactgctgcttcatgccagcattttagttcgatgttgacgcgcaacacgtgtcttgtcgagctccaattgagcaataataaattaggtgattgtggcgtgcagcagctttgccaagggttatctcaaccaggtgccgccctccaggttttgtggttgggcgactgtgatgtatcgcatagtggctgtgcaagcttagcttccgtgttgcttgtcaaccgttccttacgcgaactcgaccttagtaacaactgcatgggcgaagaagggattctccgtttgatggagagcctggaacaaccgggatgcgtgcttgaacagttggtcctctatgacatctactggtcggaggagatggataattctttacgtgccttagaagagcgcaaaccgtcattgcgcgtgattttc

SEQ ID NO: 152 - protein, 468 aa, synthetic construct
  REGION 1..468: note = Variant of RNase inhibitor
MHHHHHHGGSGTMSLDIQCQQLSDARWTELLPLLQQSEVVRLDDCGLTEMRCKDISSALQANPSLTELSLCTNELGDAGVHLVLQGLQSPTCKIEKLSLQNCCLTKTGCGVLPDMLRSMPTLRELYLNDNPLGDAGLQLLCSGLLDPQCHLEKLQVEYCNLTAASCESLASALRAKRHFKELAVSNNELGEAGVRVLCRGLVDSACQLEVLKLENCGLTSASCEDLCGVVASKPSLQELDLGDNKLGDQGIATLCPFLLHPSCQIRVLWLWDCDITTAGCRDLCRVLRAKESLKELSLAGNALGDEGARLLCESLLEPACQLESLWVKSCSFTAASCQHFSSMLTRNTCLVELQLSNNKLGDCGVQQLCQGLSQPGAALQVLWLGDCDVSHSGCASLASVLLVNRSLRELDLSNNCMGEEGILRLMESLEQPGCVLEQLVLYDIYWSEEMDNSLRALEERKPSLRVIF

SEQ ID NO: 153 - DNA, 1404 bp, synthetic construct
  misc_feature 1..1404: note = Variant of RNase inhibitor
  source 1..1404: mol_type = other DNA
atgcaccatcatcatcatcatggcggtagcggcaccatgtctctggatattcagtgtcaacaattgtcagatgcgcgttggacggaactgttaccgcttctgcaacagagcgaagtggtgcgcctggatgactgcggcctcactgagatgcgctgcaaagacatcagtagtgcactgcaagccaacccatcgttgaccgaattaagcctgtgtacaaatgagctgggtgatgctggagttcatttagtcctgcagggcttgcagtctcctacctgcaagattgaaaaactgtccctccagaactgttgtctgacgaagactggttgcggtgtattaccggacatgcttcgttcaatgcccaccctgcgcgaactgtatctgaatgataacccgttgggcgatgcgggcctccagctgctttgctccgggctgttagacccgcaatgtcacctggagaaactgcaggtggaatactgcaatctcacagcagcctcgtgcgaaagcttggcgagcgctctgcgtgccaaacgccattttaaagaattagcggtttcgaacaacgaactgggtgaagcaggcgtgcgcgtactttgtcgtgggctggtggatagtgcgtgccaactggaggttctgaaactggaaaattgtggattgacctctgcctcctgcgaggatctttgtggtgtggtcgctagcaaaccaagcctccaggaattggaccttggcgataacaaattaggtgaccaaggcatcgcaacgttatgcccgtttctgcttcacccttcatgccagattcgtgttttgtggctctgggattgtgatatcaccaccgccggctgccgcgacctctgtcgtgtattacgcgcgaaggaatccctcaaagagctgagtcttgcgggtaatgccttgggagatgaaggcgcacgtctcttgtgcgaatcgttattagaaccggcgtgccagctccaaagcctttgggtgaaaagctgttctttcactgctgcttcatgccagcattttagttcgatgttgacgcgcaacacgtgtcttgtcgagctccaattgagcaataataaattaggtgattgtggcgtgcagcagctttgccaagggttatctcaaccaggtgccgccctccaggttttgtggttgggcgactgtgatgtagcgcatagtggctgtgcaagcttagcttccgtgttgcttgtcaaccgttccttacgcgaactcgaccttagtaacaactgcatgggcgaagaagggattctccgtttgatggagagcctggaacaaccgggatgcgtgcttgaacagttggtcctctatgacatctactggtcggaggagatggataattctttacgtgccttagaagagcgcaaaccgtcattgcgcgtgattttc

SEQ ID NO: 154 - protein, 468 aa, synthetic construct
  REGION 1..468: note = Variant of RNase inhibitor
MHHHHHHGGSGTMSLDIQCQQLSDARWTELLPLLQQSEVVRLDDCGLTEMRCKDISSALQANPSLTELSLCTNELGDAGVHLVLQGLQSPTCKIEKLSLQNCCLTKTGCGVLPDMLRSMPTLRELYLNDNPLGDAGLQLLCSGLLDPQCHLEKLQVEYCNLTAASCESLASALRAKRHFKELAVSNNELGEAGVRVLCRGLVDSACQLEVLKLENCGLTSASCEDLCGVVASKPSLQELDLGDNKLGDQGIATLCPFLLHPSCQIRVLWLWDCDITTAGCRDLCRVLRAKESLKELSLAGNALGDEGARLLCESLLEPACQLQSLWVKSCSFTAASCQHFSSMLTRNTCLVELQLSNNKLGDCGVQQLCQGLSQPGAALQVLWLGDCDVAHSGCASLASVLLVNRSLRELDLSNNCMGEEGILRLMESLEQPGCVLEQLVLYDIYWSEEMDNSLRALEERKPSLRVIF

SEQ ID NO: 155 - DNA, 1404 bp, synthetic construct
  misc_feature 1..1404: note = Variant of RNase inhibitor
  source 1..1404: mol_type = other DNA
atgcaccatcatcatcatcatggcggtagcggcaccatgtctctggatattcagtgtcaacaattgtcagatgcgcgttggacggaactgttaccgcttctgcaacagagcgaagtggtgcgcctggatgactgcggcctcactgagatgcgctgcaaagacatcagtagtgcactgcaagccaacccatcgttgaccgaattaagcctgtgtacaaatgagctgggtgatgctggagttcatttagtcctgcagggcttgcagtctcctacctgcaagattgaaaaactgtccctccagaactgttgtctgacgaagactggttgcggtgtattaccggacatgcttcgttcaatgcccaccctgcgcgaactgtatctgaatgataacccgttgggcgatgcgggcctccagctgctttgctccgggctgttagacccgcaatgtcacctggagaaactgcaggtggaatactgcaatctcacagcagcctcgtgcgaaagcttggcgagcgctctgcgtgccaaacgccattttaaagaattagcggtttcgaacaacgaactgggtgaagcaggcgtgcgcgtactttgtcgtgggctggtggatagtgcgtgccaactggaggttctgaaactggaaaattgtggattgacctctgcctcctgcgaggatctttgtggtgtggtcgctagcaaaccaagcctccaggaattggaccttggcgataacaaattaggtgaccaaggcatcgcaacgttatgcccgtttctgcttcacccttcatgccagattcgtgttttgtggctctgggattgtgatatcaccaccgccggctgccgcgacctctgtcgtgtattacgcgcgaaggaatccctcaaagagctgagtcttgcgggtaatgccttgggagatgaaggcgcacgtctcttgtgcgaatcgttattagaaccggcgtgccagctccaaagcctttgggtgaaaagctgttctttcactgctgcttcatgccagcattttagttcgatgttgacgcgcaacacgtgtcttgtcgagctccaattgagcaataataaattaggtgattgtggcgtgcagcagctttgccaagggttatctcaaccaggtacggccctccaggttttgtggttgggcgactgtgatgtaacgcatagtggctgtgcaagcttagcttccgtgttgcttgtcaaccgttccttacgcgaactcgaccttagtaacaactgcatgggcgaagaagggattctccgtttgatggagagcgtggaacaaccgggatgcgtgcttgaacagttggtcctctatgacatctactggtcggaggagatggataattctttacgtgccttagaagagcgcaaaccgtcattgcgcgtgattttc

SEQ ID NO: 156 - protein, 468 aa, synthetic construct
  REGION 1..468: note = Variant of RNase inhibitor
MHHHHHHGGSGTMSLDIQCQQLSDARWTELLPLLQQSEVVRLDDCGLTEMRCKDISSALQANPSLTELSLCTNELGDAGVHLVLQGLQSPTCKIEKLSLQNCCLTKTGCGVLPDMLRSMPTLRELYLNDNPLGDAGLQLLCSGLLDPQCHLEKLQVEYCNLTAASCESLASALRAKRHFKELAVSNNELGEAGVRVLCRGLVDSACQLEVLKLENCGLTSASCEDLCGVVASKPSLQELDLGDNKLGDQGIATLCPFLLHPSCQIRVLWLWDCDITTAGCRDLCRVLRAKESLKELSLAGNALGDEGARLLCESLLEPACQLQSLWVKSCSFTAASCQHFSSMLTRNTCLVELQLSNNKLGDCGVQQLCQGLSQPGTALQVLWLGDCDVTHSGCASLASVLLVNRSLRELDLSNNCMGEEGILRLMESVEQPGCVLEQLVLYDIYWSEEMDNSLRALEERKPSLRVIF

SEQ ID NO: 157 - DNA, 1404 bp, synthetic construct
  misc_feature 1..1404: note = Variant of RNase inhibitor
  source 1..1404: mol_type = other DNA
atgcaccatcatcatcatcatggcggtagcggcaccatgtctctggatattcagtgtcaacaattgtcagatgcgcgttggacggaactgttaccgcttctgcaacagagcgaagtggtgcgcctggatgactgcggcctcactgagatgcgctgcaaagacatcagtagtgcactgcaagccaacccatcgttgaccgaattaagcctgtgtacaaatgagctgggtgatgctggagttcatttagtcctgcagggcttgcagtctcctacctgcaagattgaaaaactgtccctccagaactgttgtctgacgaagactggttgcggtgtattaccggacatgcttcgttcaatgcccaccctgcgcgaactgtatctgaatgataacccgttgggcgatgtgggcctccagctgctttgctccgggctgttagacccgcaatgtcacctggagaaactgcaggtggaatactgcaatctcacagcagcctcgtgcgaaagcttggcgagcgctctgcgtgccaaacgccattttaaagaattagcggtttcgaacaacgaactgggtgaagcaggcgtgcgcgtactttgtcgtgggctggtggatagtgcgtgccaactggaggttctgaaactggaaaattgtggattgacctctgcctcctgcgaggatctttgtggtgtggtcgctagcaaaccaagcctccaggaattggaccttggcgataacaaattaggtgaccaaggcatcgcaacgttatgcccgtttctgcttcacccttcatgccagattcgtgttttgtggctctgggattgtgatatcaccaccgccggctgccgcgacctctgtcgtgtattacgcgcgaaggaatccctcaaagagctgagtcttgcgggtaatgccttgggagatgaaggcgcacgtctcttgtgcgaatcgttattagaaccggcgtgccagctcgaaagcctttgggtgaaaagctgttctttcactgctgcttcatgccagcattttagttcgatgttgacgcgcaacacgtgtcttgtcgagctccaattgagcaataataaattaggtgattgtggcgtgcagcagctttgccaagggttatctcaaccaggttcggccctccaggttttgtggttgggcgactgtgatgtaacgcatagtggctgtgcaagcttagcttccgtgttgcttgtcaaccgttccttacgcgaactcgaccttagtaacaactgcatgggcgaagaagggattctccgtttgatggagagcgtggaacaaccgggatgcgtgcttgaacagttggtcctctatgacatctactggtcggaggagatggataattctttacgtgccttagaagagcgcaaaccgtcattgcgcgtgattttc

SEQ ID NO: 158 - protein, 468 aa, synthetic construct
  REGION 1..468: note = Variant of RNase inhibitor
MHHHHHHGGSGTMSLDIQCQQLSDARWTELLPLLQQSEVVRLDDCGLTEMRCKDISSALQANPSLTELSLCTNELGDAGVHLVLQGLQSPTCKIEKLSLQNCCLTKTGCGVLPDMLRSMPTLRELYLNDNPLGDVGLQLLCSGLLDPQCHLEKLQVEYCNLTAASCESLASALRAKRHFKELAVSNNELGEAGVRVLCRGLVDSACQLEVLKLENCGLTSASCEDLCGVVASKPSLQELDLGDNKLGDQGIATLCPFLLHPSCQIRVLWLWDCDITTAGCRDLCRVLRAKESLKELSLAGNALGDEGARLLCESLLEPACQLESLWVKSCSFTAASCQHFSSMLTRNTCLVELQLSNNKLGDCGVQQLCQGLSQPGSALQVLWLGDCDVTHSGCASLASVLLVNRSLRELDLSNNCMGEEGILRLMESVEQPGCVLEQLVLYDIYWSEEMDNSLRALEERKPSLRVIF

SEQ ID NO: 159 - DNA, 1404 bp, synthetic construct
  misc_feature 1..1404: note = Variant of RNase inhibitor
  source 1..1404: mol_type = other DNA
atgcaccatcatcatcatcatggcggtagcggcaccatgtctctggatattcagtgtcaacaattgtcagatgcgcgttggacggaactgttaccgcttctgcaacagagcgaagtggtgcgcctggatgactgcggcctcactgagatgcgctgcaaagacatcagtagtgcactgcaagccaacccatcgttgaccgaattaagcctgtgtacaaatgagctgggtgatgctggagttcatttagtcctgcagggcttgcagtctcctacctgcaagattgaaaaactgtccctccagaactgttgtctgacgaagactggttgcggtgtattaccggacatgcttcgttcaatgcccaccctgcgcgaactgtatctgaatgataacccgttgggcgatgcgggcctccagctgctttgctccgggctgttagacccgcaatgtcacctggagaaactgcaggtggaatactgcaatctcacagcagcctcgtgcgaaagcttggcgagcgctctgcgtgccaaacgccattttaaagaattagcggtttcgaacaacgaactgggtgaagcaggcgtgcgcgtactttgtcgtgggctggtggatagtgcgtgccaactggaggttctgaaactggaaaattgtggattgacctctgcctcctgcgaggatctttgtggtgtggtcgctagcaaaccaagcctccaggaattggaccttggcgataacaaattaggtgaccaaggcatcgcaacgttatgcccgcgcctgcttcacccttcatgccagattcgtgttttgtggctctgggattgtgatatcaccaccgccggctgccgcgacctctgtcgtgtattacgcgcgaaggaatccctcaaagagctgagtcttgcgggtaatgccttgggagatgaaggcgcacgtctcttgtgcgaatcgttattagaaccggcgtgccagctcgaaagcctttgggtgaaaagctgttctttcactgctgcttcatgccagcattttagttcgatgttgacgcgcaacacgtgtcttgtcgagctccaattgagcaataataaattaggtgattgtggcgtgcagcagctttgccaagggttatctcaaccaggtacggccctccaggttttgtggttgggcgactgtgatgtatcgcatagtggctgtgcaagcttagcttccgtgttgcttgtcaaccgttccttacgcgaactcgaccttagtaacaactgcatgggcgaagaagggattctccgtttgatggagagcctggaacaaccgggatgcgtgcttgaacagttggtcctctatgacatctactggtcggaggagatggataattctttacgtgccttagaagagcgcaaaccgtcattgcgcgtgattttc

SEQ ID NO: 160 - protein, 468 aa, synthetic construct
  REGION 1..468: note = Variant of RNase inhibitor
MHHHHHHGGSGTMSLDIQCQQLSDARWTELLPLLQQSEVVRLDDCGLTEMRCKDISSALQANPSLTELSLCTNELGDAGVHLVLQGLQSPTCKIEKLSLQNCCLTKTGCGVLPDMLRSMPTLRELYLNDNPLGDAGLQLLCSGLLDPQCHLEKLQVEYCNLTAASCESLASALRAKRHFKELAVSNNELGEAGVRVLCRGLVDSACQLEVLKLENCGLTSASCEDLCGVVASKPSLQELDLGDNKLGDQGIATLCPRLLHPSCQIRVLWLWDCDITTAGCRDLCRVLRAKESLKELSLAGNALGDEGARLLCESLLEPACQLESLWVKSCSFTAASCQHFSSMLTRNTCLVELQLSNNKLGDCGVQQLCQGLSQPGTALQVLWLGDCDVSHSGCASLASVLLVNRSLRELDLSNNCMGEEGILRLMESLEQPGCVLEQLVLYDIYWSEEMDNSLRALEERKPSLRVIF

SEQ ID NO: 161 - DNA, 1404 bp, synthetic construct
  misc_feature 1..1404: note = Variant of RNase inhibitor
  source 1..1404: mol_type = other DNA
atgcaccatcatcatcatcatggcggtagcggcaccatgtctctggatattcagtgtcaacaattgtcagatgcgcgttggacggaactgttaccgcttctgcaacagagcgaagtggtgcgcctggatgactgcggcctcactgagatgcgctgcaaagacatcagtagtgcactgcaagccaacccatcgttgaccgaattaagcctgtgtacaaatgagctgggtgatgctggagttcatttagtcctgcagggcttgcagtctcctacctgcaagattgaaaaactgtccctccagaactgttgtctgacgaagactggttgcggtgtattaccggacatgcttcgttcaatgcccaccctgcgcgaactgtatctgaatgataacccgttgggcgatgcgggcctccagctgctttgctccgggctgttagacccgcaatgtcacctggagaaactgcaggtggaatactgcaatctcacagcagcctcgtgcgaaagcttggcgagcgctctgcgtgccaaacgccattttaaagaattagcggtttcgaacaacgaactgggtgaagcaggcgtgcgcgtactttgtcgtgggctggtggatagtgcgtgccaactggaggttctgaaactggaaaattgtggattgacctctgcctcctgcgaggatctttgtggtgtggtcgctagcaaaccaagcctccaggaattggaccttggcgataacaaattaggtgaccaaggcatcgcaacgttatgcccgtttctgcttcacccttcatgccagattcgtgttttgtggctctgggattgtgatatcaccaccgccggctgccgcgacctctgtcgtgtattacgcgcgaaggaatccctcaaagagctgagtcttgcgggtaatgccttgggagatgaaggcgcacgtctcttgtgcgaatcgttattagaaccggcgtgccagctcgaaagcctttgggtgaaaagctgttctttcactgctgcttcatgccagcattttagttcgatgttgacgcgcaacacgtgtcttgtcgagctccaattgagcaataataaattaggtgattgtggcgtgcagcagctttgccaagggttatctcaaccaggtgccgccctccaggttttgtggttgggcgactgtgatgtatcgcatagtggctgtgcaagcttagcttccgtgttgcttgtcaaccgttccttacgcgaactcgaccttagtaacaactgcatgggcgaagaagggattctccgtttgatggagagcgtggaacaaccgggatgcgtgcttgaacagttggtcctctatgacatctactggtcggaggagatggataattctttacgtgccttagaagagcgcaaaccgtcattgcgcgtgattttc

SEQ ID NO: 162 - protein, 468 aa, synthetic construct
  REGION 1..468: note = Variant of RNase inhibitor
MHHHHHHGGSGTMSLDIQCQQLSDARWTELLPLLQQSEVVRLDDCGLTEMRCKDISSALQANPSLTELSLCTNELGDAGVHLVLQGLQSPTCKIEKLSLQNCCLTKTGCGVLPDMLRSMPTLRELYLNDNPLGDAGLQLLCSGLLDPQCHLEKLQVEYCNLTAASCESLASALRAKRHFKELAVSNNELGEAGVRVLCRGLVDSACQLEVLKLENCGLTSASCEDLCGVVASKPSLQELDLGDNKLGDQGIATLCPFLLHPSCQIRVLWLWDCDITTAGCRDLCRVLRAKESLKELSLAGNALGDEGARLLCESLLEPACQLESLWVKSCSFTAASCQHFSSMLTRNTCLVELQLSNNKLGDCGVQQLCQGLSQPGAALQVLWLGDCDVSHSGCASLASVLLVNRSLRELDLSNNCMGEEGILRLMESVEQPGCVLEQLVLYDIYWSEEMDNSLRALEERKPSLRVIF

SEQ ID NO: 163 - DNA, 1404 bp, synthetic construct
  misc_feature 1..1404: note = Variant of RNase inhibitor
  source 1..1404: mol_type = other DNA
atgcaccatcatcatcatcatggcggtagcggcaccatgtctctggatattcagtgtcaacaattgtcagatgcgcgttggacggaactgttaccgcttctgcaacagagcgaagtggtgcgcctggatgactgcggcctcactgagatgcgctgcaaagacatcagtagtgcactgcaagccaacccatcgttgaccgaattaagcctgtgtacaaatgagctgggtgatgctggagttcatttagtcctgcagggcttgcagtctcctacctgcaagattgaaaaactgtccctccagaactgttgtctgacgaagactggttgcggtgtattaccggacatgcttcgttcaatgcccaccctgcgcgaactgtatctgaatgataacccgttgggcgatgcgggcctccagctgctttgctccgggctgttagacccgcaatgtcacctggagaaactgcaggtggaatactgcaatctcacagcagcctcgtgcgaaagcttggcgagcgctctgcgtgccaaacgccattttaaagaattagcggtttcgaacaacgaactgggtgaagcaggcgtgcgcgtactttgtcgtgggctggtggatagtgcgtgccaactggaggttctgaaactggaaaattgtggattgacctctgcctcctgcgaggatctttgtggtgtggtcgctagcaaaccaagcctccaggaattggaccttggcgataacaaattaggtgaccaaggcatcgcaacgttatgcccgtttctgcttcacccttcatgccagattcgtgttttgtggctctgggattgtgatatcaccaccgccggctgccgcgacctctgtcgtgtattacgcgcgaaggaatccctcaaagagctgagtcttgcgggtaatgccttgggagatgaaggcgcacgtctcttgtgcgaatcgttattagaaccggcgtgccagctcgaaagcctttgggtgaaaagctgttctttcactgctgcttcatgccagcattttagttcgatgttgacgcgcaacacgtgtcttgtcgagctccaattgagcaataataaattaggtgattgtggcgtgcagcagctttgccaagggttatctcaaccaggttcggccctccaggttttgtggttgggcgactgtgatgtatcgcatagtggctgtgcaagcttagcttccgtgttgcttgtcaaccgttccttacgcgaactcgaccttagtaacaactgcatgggcgaagaagggattctccgtttgatggagagcgttgaacaaccgggatgcgtgcttgaacagttggtcctctatgacatctactggtcggaggagatggataattctttacgtgccttagaagagcgcaaaccgtcattgcgcgtgattttc

SEQ ID NO: 164 - protein, 468 aa, synthetic construct
  REGION 1..468: note = Variant of RNase inhibitor
MHHHHHHGGSGTMSLDIQCQQLSDARWTELLPLLQQSEVVRLDDCGLTEMRCKDISSALQANPSLTELSLCTNELGDAGVHLVLQGLQSPTCKIEKLSLQNCCLTKTGCGVLPDMLRSMPTLRELYLNDNPLGDAGLQLLCSGLLDPQCHLEKLQVEYCNLTAASCESLASALRAKRHFKELAVSNNELGEAGVRVLCRGLVDSACQLEVLKLENCGLTSASCEDLCGVVASKPSLQELDLGDNKLGDQGIATLCPFLLHPSCQIRVLWLWDCDITTAGCRDLCRVLRAKESLKELSLAGNALGDEGARLLCESLLEPACQLESLWVKSCSFTAASCQHFSSMLTRNTCLVELQLSNNKLGDCGVQQLCQGLSQPGSALQVLWLGDCDVSHSGCASLASVLLVNRSLRELDLSNNCMGEEGILRLMESVEQPGCVLEQLVLYDIYWSEEMDNSLRALEERKPSLRVIF

SEQ ID NO: 165 - DNA, 1404 bp, synthetic construct
  misc_feature 1..1404: note = Variant of RNase inhibitor
  source 1..1404: mol_type = other DNA
atgcaccatcatcatcatcatggcggtagcggcaccatgtctctggatattcagtgtcaacaattgtcagatgcgcgttggacggaactgttaccgcttctgcaacagagcgaagtggtgcgcctggatgactgcggcctcactgagatgcgctgcaaagacatcagtagtgcactgcaagccaacccatcgttgaccgaattaagcctgtgtacaaatgagctgggtgatgctggagttcatttagtcctgcagggcttgcagtctcctacctgcaagattgaaaaactgtccctccagaactgttgtctgacgaagactggttgcggtgtattaccggacatgcttcgttcaatgcccaccctgcgcgaactgtatctgaatgataacccgttgggcgatgcgggcctccagctgctttgctccgggctgttagacccgcaatgtcacctggagaaactgcaggtggaatactgcaatctcacagcagcctcgtgcgaaagcttggcgagcgctctgcgtgccaaacgccattttaaagaattagcggtttcgaacaacgaactgggtgaagcaggcgtgcgcgtactttgtcgtgggctggtggatagtgcgtgccaactggaggttctgaaactggaaaattgtggattgacctctgcctcctgcgaggatctttgtggtgtggtcgctagcaaaccaagcctccaggaattggaccttggcgataacaaattaggtgaccaaggcatcgcaacgttatgcccgtttctgcttcacccttcatgccagattcgtgttttgtggctctgggattgtgatatcaccaccgccggctgccgcgacctctgtcgtgtattacgcgcgaaggaatccctcaaagagctgagtcttgcgggtaatgccttgggagatgaaggcgcacgtctcttgtgcgaatcgttattagaaccggcgtgccagctcgaaagcctttgggtgaaaagctgttctttcactgctgcttcatgccagcattttagttcgatgttgacgcgcaacacgtgtcttgtcgagctccaattgagcaataataaattaggtgattgtggcgtgcagcagctttgccaagggttatctcaaccaggtacggccctccaggttttgtggttgggcgactgtgatgtaacgcatagtggctgtgcaagcttagcttccgtgttgcttgtcaaccgttccttacgcgaactcgaccttagtaacaactgcatgggcgaagaagggattctccgtttgatggagagcgttgaacaaccgggatgcgtgcttgaacagttggtcctctatgacatctactggtcggaggagatggataattctttacgtgccttagaagagcgcaaaccgtcattgcgcgtgattttc

SEQ ID NO: 166 - protein, 468 aa, synthetic construct
  REGION 1..468: note = Variant of RNase inhibitor
MHHHHHHGGSGTMSLDIQCQQLSDARWTELLPLLQQSEVVRLDDCGLTEMRCKDISSALQANPSLTELSLCTNELGDAGVHLVLQGLQSPTCKIEKLSLQNCCLTKTGCGVLPDMLRSMPTLRELYLNDNPLGDAGLQLLCSGLLDPQCHLEKLQVEYCNLTAASCESLASALRAKRHFKELAVSNNELGEAGVRVLCRGLVDSACQLEVLKLENCGLTSASCEDLCGVVASKPSLQELDLGDNKLGDQGIATLCPFLLHPSCQIRVLWLWDCDITTAGCRDLCRVLRAKESLKELSLAGNALGDEGARLLCESLLEPACQLESLWVKSCSFTAASCQHFSSMLTRNTCLVELQLSNNKLGDCGVQQLCQGLSQPGTALQVLWLGDCDVTHSGCASLASVLLVNRSLRELDLSNNCMGEEGILRLMESVEQPGCVLEQLVLYDIYWSEEMDNSLRALEERKPSLRVIF

SEQ ID NO: 167 - DNA, 1404 bp, synthetic construct
  misc_feature 1..1404: note = Variant of RNase inhibitor
  source 1..1404: mol_type = other DNA
atgcaccatcatcatcatcatggcggtagcggcaccatgtctctggatattcagtgtcaacaattgtcagatgcgcgttggacggaactgttaccgcttctgcaacagagcgaagtggtgcgcctggatgactgcggcctcactgagatgcgctgcaaagacatcagtagtgcactgcaagccaacccatcgttgaccgaattaagcctgtgtacaaatgagctgggtgatgctggagttcatttagtcctgcagggcttgcagtctcctacctgcaagattgaaaaactgtccctccagaactgttgtctgacgaagactggttgcggtgtattaccggacatgcttcgttcaatgcccaccctgcgcgaactgtatctgaatgataacccgttgggcgatgcgggcctccagctgctttgctccgggctgttagacccgcaatgtcacctggagaaactgcaggtggaatactgcaatctcacagcagcctcgtgcgaaagcttggcgagcgctctgcgtgccaaacgccattttaaagaattagcggtttcgaacaacgaactgggtgaagcaggcgtgcgcgtactttgtcgtgggctggtggatagtgcgtgccaactggaggttctgaaactggaaaattgtggattgacctctgcctcctgcgaggatctttgtggtgtggtcgctagcaaaccaagcctccaggaattggaccttggcgataacaaattaggtgaccaaggcatcgcaacgttatgcccgtttctgcttcacccttcatgccagattcgtgttttgtggctctgggattgtgatatcaccaccgccggctgccgcgacctctgtcgtgtattacgcgcgaaggaatccctcaaagagctgagtcttgcgggtaatgccttgggagatgaaggcgcacgtctcttgtgcgaatcgttattagaaccggcgtgccagctccaaagcctttgggtgaaaagctgttctttcactgctgcttcatgccagcattttagttcgatgttgacgcgcaacacgtgtcttgtcgagctccaattgagcaataataaattaggtgattgtggcgtgcagcagctttgccaagggttatctcaaccaggttcggccctccaggttttgtggttgggcgactgtgatgtagcgcatagtggctgtgcaagcttagcttccgtgttgcttgtcaaccgttccttacgcgaactcgaccttagtaacaactgcatgggcgaagaagggattctccgtttgatggagagcctggaacaaccgggatgcgtgcttgaacagttggtcctctatgacatctactggtcggaggagatggataattctttacgtgccttagaagagcgcaaaccgtcattgcgcgtgattttc

SEQ ID NO: 168 - protein, 468 aa, synthetic construct
  REGION 1..468: note = Variant of RNase inhibitor
MHHHHHHGGSGTMSLDIQCQQLSDARWTELLPLLQQSEVVRLDDCGLTEMRCKDISSALQANPSLTELSLCTNELGDAGVHLVLQGLQSPTCKIEKLSLQNCCLTKTGCGVLPDMLRSMPTLRELYLNDNPLGDAGLQLLCSGLLDPQCHLEKLQVEYCNLTAASCESLASALRAKRHFKELAVSNNELGEAGVRVLCRGLVDSACQLEVLKLENCGLTSASCEDLCGVVASKPSLQELDLGDNKLGDQGIATLCPFLLHPSCQIRVLWLWDCDITTAGCRDLCRVLRAKESLKELSLAGNALGDEGARLLCESLLEPACQLQSLWVKSCSFTAASCQHFSSMLTRNTCLVELQLSNNKLGDCGVQQLCQGLSQPGSALQVLWLGDCDVAHSGCASLASVLLVNRSLRELDLSNNCMGEEGILRLMESLEQPGCVLEQLVLYDIYWSEEMDNSLRALEERKPSLRVIF

SEQ ID NO: 169 - DNA, 1404 bp, synthetic construct
  misc_feature 1..1404: note = Variant of RNase inhibitor
  source 1..1404: mol_type = other DNA
atgcaccatcatcatcatcatggcggtagcggcaccatgtctctggatattcagtgtcaacaattgtcagatgcgcgttggacggaactgttaccgcttctgcaacagagcgaagtggtgcgcctggatgactgcggcctcactgagatgcgctgcaaagacatcagtagtgcactgcaagccaacccatcgttgaccgaattaagcctgtgtacaaatgagctgggtgatgctggagttcatttagtcctgcagggcttgcagtctcctacctgcaagattgaaaaactgtccctccagaactgttgtctgacgaagactggttgcggtgtattaccggacatgcttcgttcaatgcccaccctgcgcgaactgtatctgaatgataacccgttgggcgatgcgggcctccagctgctttgctccgggctgttagacccgcaatgtcacctggagaaactgcaggtggaatactgcaatctcacagcagcctcgtgcgaaagcttggcgagcgctctgcgtgccaaacgccattttaaagaattagcggtttcgaacaacgaactgggtgaagcaggcgtgcgcgtactttgtcgtgggctggtggatagtgcgtgccaactggaggttctgaaactggaaaattgtggattgacctctgcctcctgcgaggatctttgtggtgtggtcgctagcaaaccaagcctccaggaattggaccttggcgataacaaattaggtgaccaaggcatcgcaacgttatgcccgtttctgcttcacccttcatgccagattcgtgttttgtggctctgggattgtgatatcaccaccgccggctgccgcgacctctgtcgtgtattacgcgcgaaggaatccctcaaagagctgagtcttgcgggtaatgccttgggagatgaaggcgcacgtctcttgtgcgaatcgttattagaaccggcgtgccagctccagagcctttgggtgaaaagctgttctttcactgctgcttcatgccagcattttagttcgatgttgacgcgcaacacgtgtcttgtcgagctccaattgagcaataataaattaggtgattgtggcgtgcagcagctttgccaagggttatctcaaccaggtgcggccctccaggttttgtggttgggcgactgtgatgtaacgcatagtggctgtgcaagcttagcttccgtgttgcttgtcaaccgttccttacgcgaactcgaccttagtaacaactgcatgggcgaagaagggattctccgtttgatggagagcgtggaacaaccgggatgcgtgcttgaacagttggtcctctatgacatctactggtcggaggagatggataattctttacgtgccttagaagagcgcaaaccgtcattgcgcgtgattttc

SEQ ID NO: 170 - protein, 468 aa, synthetic construct
  REGION 1..468: note = Variant of RNase inhibitor
MHHHHHHGGSGTMSLDIQCQQLSDARWTELLPLLQQSEVVRLDDCGLTEMRCKDISSALQANPSLTELSLCTNELGDAGVHLVLQGLQSPTCKIEKLSLQNCCLTKTGCGVLPDMLRSMPTLRELYLNDNPLGDAGLQLLCSGLLDPQCHLEKLQVEYCNLTAASCESLASALRAKRHFKELAVSNNELGEAGVRVLCRGLVDSACQLEVLKLENCGLTSASCEDLCGVVASKPSLQELDLGDNKLGDQGIATLCPFLLHPSCQIRVLWLWDCDITTAGCRDLCRVLRAKESLKELSLAGNALGDEGARLLCESLLEPACQLQSLWVKSCSFTAASCQHFSSMLTRNTCLVELQLSNNKLGDCGVQQLCQGLSQPGAALQVLWLGDCDVTHSGCASLASVLLVNRSLRELDLSNNCMGEEGILRLMESVEQPGCVLEQLVLYDIYWSEEMDNSLRALEERKPSLRVIF

SEQ ID NO: 171 - DNA, 1404 bp, synthetic construct
  misc_feature 1..1404: note = Variant of RNase inhibitor
  source 1..1404: mol_type = other DNA
atgcaccatcatcatcatcatggcggtagcggcaccatgtctctggatattcagtgtcaacaattgtcagatgcgcgttggacggaactgttaccgcttctgcaacagagcgaagtggtgcgcctggatgactgcggcctcactgagatgcgctgcaaagacatcagtagtgcactgcaagccaacccatcgttgaccgaattaagcctgtgtacaaatgagctgggtgatgctggagttcatttagtcctgcagggcttgcagtctcctacctgcaagattgaaaaactgtccctccagaactgttgtctgacgaagactggttgcggtgtattaccggacatgcttcgttcaatgcccaccctgcgcgaactgtatctgaatgataacccgttgggcgatgcgggcctccagctgctttgctccgggctgttagacccgcaatgtcacctggagaaactgcaggtggaatgctgcaatctcacagcagcctcgtgcgaaagcttggcgagcgctctgcgtgccaaacgccattttaaagaattagcggtttcgaacaacgaactgggtgaagcaggcgtgcgcgtactttgtcgtgggctggtggatagtgcgtgccaactggaggttctgaaactggaaaattgtggattgacctctgcctcctgcgaggatctttgtggtgtggtcgctagcaaaccaagcctccaggaattggaccttggcgataacaaattaggtgaccaaggcatcgcaacgttatgcccgtttctgcttcacccttcatgccagattcgtgttttgtggctctgggattgtgatatcaccaccgccggctgccgcgacctctgtcgtgtattacgcgcgaaggaatccctcaaagagctgagtcttgcgggtaatgccttgggagatgaaggcgcacgtctcttgtgcgaatcgttattagaaccggcgtgccagctcgaaagcctttgggtgaaaagctgttctttcactgctgcttcatgccagcattttagttcgatgttgacgcgcaacacgtgtcttgtcgagctccaattgagcaataataaattaggtgattgtggcgtgcagcagctttgccaagggttatctcaaccaggtacggccctccaggttttgtggttgggcgactgtgatgtatcgcatagtggctgtgcaagcttagcttccgtgttgcttgtcaaccgttccttacgcgaactcgaccttagtaacaactgcatgggcgaagaagggattctccgtttgatggagagcgttgaacaaccgggatgcgtgcttgaacagttggtcctctatgacatctactggtcggaggagatggataattctttacgtgccttagaagagcgcaaaccgtcattgcgcgtgattttc

SEQ ID NO: 172 - protein, 468 aa, synthetic construct
  REGION 1..468: note = Variant of RNase inhibitor
MHHHHHHGGSGTMSLDIQCQQLSDARWTELLPLLQQSEVVRLDDCGLTEMRCKDISSALQANPSLTELSLCTNELGDAGVHLVLQGLQSPTCKIEKLSLQNCCLTKTGCGVLPDMLRSMPTLRELYLNDNPLGDAGLQLLCSGLLDPQCHLEKLQVECCNLTAASCESLASALRAKRHFKELAVSNNELGEAGVRVLCRGLVDSACQLEVLKLENCGLTSASCEDLCGVVASKPSLQELDLGDNKLGDQGIATLCPFLLHPSCQIRVLWLWDCDITTAGCRDLCRVLRAKESLKELSLAGNALGDEGARLLCESLLEPACQLESLWVKSCSFTAASCQHFSSMLTRNTCLVELQLSNNKLGDCGVQQLCQGLSQPGTALQVLWLGDCDVSHSGCASLASVLLVNRSLRELDLSNNCMGEEGILRLMESVEQPGCVLEQLVLYDIYWSEEMDNSLRALEERKPSLRVIF

SEQ ID NO: 173 - DNA, 1404 bp, synthetic construct
  misc_feature 1..1404: note = Variant of RNase inhibitor
  source 1..1404: mol_type = other DNA
atgcaccatcatcatcatcatggcggtagcggcaccatgtctctggatattcagtgtcaacaattgtcagatgcgcgttggacggaactgttaccgcttctgcaacagagcgaagtggtgcgcctggatgactgcggcctcactgagatgcgctgcaaagacatcagtagtgcactgcaagccaacccatcgttgaccgaattaagcctgtgtacaaatgagctgggtgatgctggagttcatttagtcctgcagggcttgcagtctcctacctgcaagattgaaaaactgtccctccagaactgttgtctgacgaagactggttgcggtgtattaccggacatgcttcgttcaatgcccaccctgcgcgaactgtatctgaatgataacccgttgggcgatgcgggcctccagctgctttgctccgggctgttagacccgcaatgtcacctggagaaactgcaggtggaatactgcaatctcacagcagcctcgtgcgaaagcttggcgagcgctctgcgtgccaaacgccattttaaagaattagcggtttcgaacaacgaactgggtgaagcaggcgtgcgcgtactttgtcgtgggctggtggatagtgcgtgccaactggaggttctgaaactggaaaattgtggattgacctctgcctcctgcgaggatctttgtggtgtggtcgctagcaaaccaagcctccaggaattggaccttggcgataacaaattaggtgaccaaggcatcgcaacgttatgcccgtttctgcttcacccttcatgccagattcgtgttttgtggctctgggattgtgatatcaccaccgccggctgccgcgacctctgtcgtgtattacgcgcgaaggaatccctcaaagagctgagtcttgcgggtaatgccttgggagatgaaggcgcacgtctcttgtgcgaatcgttattagaaccggcgtgccagctccaaagcctttgggtgaaaagctgttctttcactgctgcttcatgccagcattttagttcgatgttgacgcgcaacacgtgtcttgtcgagctccaattgagcaataataaattaggtgattgtggcgtgcagcagctttgccaagggttatctcaaccaggtacggccctccaggttttgtggttgggcgactgtgatgtagcacatagtggctgtgcaagcttagcttccgtgttgcttgtcaaccgttccttacgcgaactcgaccttagtaacaactgcatgggcgaagaagggattctccgtttgatggagagcctggaacaaccgggatgcgtgcttgaacagttggtcctctatgacatctactggtcggaggagatggataattctttacgtgccttagaagagcgcaaaccgtcattgcgcgtgattttc

SEQ ID NO: 174 - protein, 468 aa, synthetic construct
  REGION 1..468: note = Variant of RNase inhibitor
MHHHHHHGGSGTMSLDIQCQQLSDARWTELLPLLQQSEVVRLDDCGLTEMRCKDISSALQANPSLTELSLCTNELGDAGVHLVLQGLQSPTCKIEKLSLQNCCLTKTGCGVLPDMLRSMPTLRELYLNDNPLGDAGLQLLCSGLLDPQCHLEKLQVEYCNLTAASCESLASALRAKRHFKELAVSNNELGEAGVRVLCRGLVDSACQLEVLKLENCGLTSASCEDLCGVVASKPSLQELDLGDNKLGDQGIATLCPFLLHPSCQIRVLWLWDCDITTAGCRDLCRVLRAKESLKELSLAGNALGDEGARLLCESLLEPACQLQSLWVKSCSFTAASCQHFSSMLTRNTCLVELQLSNNKLGDCGVQQLCQGLSQPGTALQVLWLGDCDVAHSGCASLASVLLVNRSLRELDLSNNCMGEEGILRLMESLEQPGCVLEQLVLYDIYWSEEMDNSLRALEERKPSLRVIF

SEQ ID NO: 175 - DNA, 1404 bp, synthetic construct
  misc_feature 1..1404: note = Variant of RNase inhibitor
  source 1..1404: mol_type = other DNA
atgcaccatcatcatcatcatggcggtagcggcaccatgtctctggatattcagtgtcaacaattgtcagatgcgcgttggacggaactgttaccgcttctgcaacagagcgaagtggtgcgcctggatgactgcggcctcactgagatgcgctgcaaagacatcagtagtgcactgcaagccaacccatcgttgaccgaattaagcctgtgtacaaatgagctgggtgatgctggagttcatttagtcctgcagggcttgcagtctcctacctgcaagattgaaaaactgtccctccagaactgttgtctgacgaagactggttgcggtgtattaccggacatgcttcgttcaatgcccaccctgcgcgaactgtatctgaatgataacccgttgggcgatgcgggcctccagctgctttgctccgggctgttagacccgcaatgtcacctggagaaactgcaggtggaatactgcaatctcacagcagcctcgtgcgaaagcttggcgagcgctctgcgtgccaaacgccattttaaagaattagcggtttcgaacaacgaactgggtgaagcaggcgtgcgcgtactttgtcgtgggctggtggatagtgcgtgccaactggaggttctgaaactggaaaattgtggattgacctctgcctcctgcgaggatctttgtggtgtggtcgctagcaaaccaagcctccaggaattggaccttggcgataacaaattaggtgaccaaggcatcgcaacgttatgcccgtttctgcttcacccttcatgccagattcgtgttttgtggctctgggattgtgatatcaccaccgccggctgccgcgacctctgtcgtgtattacgcgcgaaggaatccctcaaagagctgagtcttgcgggtaatgccttgggagatgaaggcgcacgtctcttgtgcgaatcgttattagaaccggcgtgccagctccaaagcctttgggtgaaaagctgttctttcactgctgcttcatgccagcattttagttcgatgttgacgcgcaacacgtgtcttgtcgagctccaattgagcaataataaattaggtgattgtggcgtgcagcagctttgccaagggttatctcaaccaggttcggccctccaggttttgtggttgggcgactgtgatgtatcgcatagtggctgtgcaagcttagcttccgtgttgcttgtcaaccgttccttacgcgaactcgaccttagtaacaactgcatgggcgaagaagggattctccgtttgatggagagcgtggaacaaccgggatgcgtgcttgaacagttggtcctctatgacatctactggtcggaggagatggataattctttacgtgccttagaagagcgcaaaccgtcattgcgcgtgattttc

SEQ ID NO: 176 - protein, 468 aa, synthetic construct
  REGION 1..468: note = Variant of RNase inhibitor
MHHHHHHGGSGTMSLDIQCQQLSDARWTELLPLLQQSEVVRLDDCGLTEMRCKDISSALQANPSLTELSLCTNELGDAGVHLVLQGLQSPTCKIEKLSLQNCCLTKTGCGVLPDMLRSMPTLRELYLNDNPLGDAGLQLLCSGLLDPQCHLEKLQVEYCNLTAASCESLASALRAKRHFKELAVSNNELGEAGVRVLCRGLVDSACQLEVLKLENCGLTSASCEDLCGVVASKPSLQELDLGDNKLGDQGIATLCPFLLHPSCQIRVLWLWDCDITTAGCRDLCRVLRAKESLKELSLAGNALGDEGARLLCESLLEPACQLQSLWVKSCSFTAASCQHFSSMLTRNTCLVELQLSNNKLGDCGVQQLCQGLSQPGSALQVLWLGDCDVSHSGCASLASVLLVNRSLRELDLSNNCMGEEGILRLMESVEQPGCVLEQLVLYDIYWSEEMDNSLRALEERKPSLRVIF

SEQ ID NO: 177 - DNA, 1404 bp, synthetic construct
  misc_feature 1..1404: note = Variant of RNase inhibitor
  source 1..1404: mol_type = other DNA
atgcaccatcatcatcatcatggcggtagcggcaccatgtctctggatattcagtgtcaacaattgtcagatgcgcgttggacggaactgttaccgcttctgcaacagagcgaagtggtgcgcctggatgactgcggcctcactgagatgcgctgcaaagacatcagtagtgcactgcaagccaacccatcgttgaccgaattaagcctgtgtacaaatgagctgggtgatgctggagttcatttagtcctgcagggcttgcagtctcctacctgcaagattgaaaaactgtccctccagaactgttgtctgacgaagactggttgcggtgtattaccggacatgcttcgttcaatgcccaccctgcgcgaactgtatctgaatgataacccgttgggcgatgcgggcctccagctgctttgctccgggctgttagacccgcaatgtcacctggagaaactgcaggtggaatactgcaatctcacagcagcctcgtgcgaaagcttggcgagcgctctgcgtgccaaacgccattttaaagaattagcggtttcgaacaacgaactgggtgaagcaggcgtgcgcgtactttgtcgtgggctggtggatagtgcgtgccaactggaggttctgaaactggaaaattgtggattgacctctgcctcctgcgaggatctttgtggtgtggtcgctagcaaaccaagcctccaggaattggaccttggcgataacaaattaggtgaccaaggcatcgcaacgttatgcccgtttctgcttcacccttcatgccagattcgtgttttgtggctctgggattgtgatatcaccaccgccggctgccgcgacctctgtcgtgtattacgcgcgaaggaatccctcaaagagctgagtcttgcgggtaatgccttgggagatgaaggcgcacgtctcttgtgcgaatcgttattagaaccggcgtgccagctcgaaagcctttgggtgaaaagctgttctttcactgctgcttcatgccagcattttagttcgatgttgacgcgcaacacgtgtcttgtcgagctccaattgagcaataataaattaggtgattgtggcgtgcagcagctttgccaagggttatctcaaccaggttcggccctccaggttttgtggttgggcgactgtgatgtaacgcatagtggctgtgcaagcttagcttccgtgttgcttgtcaaccgttccttacgcgaactcgaccttagtaacaactgcatgggcgaagaagggattctccgtttgatggagagcgtggaacaaccgggatgcgtgcttgaacagttggtcctctatgacatctactggtcggaggagatggataattctttacgtgccttagaagagcgcaaaccgtcattgcgcgtgattttc

SEQ ID NO: 178 - protein, 468 aa, synthetic construct
  REGION 1..468: note = Variant of RNase inhibitor
MHHHHHHGGSGTMSLDIQCQQLSDARWTELLPLLQQSEVVRLDDCGLTEMRCKDISSALQANPSLTELSLCTNELGDAGVHLVLQGLQSPTCKIEKLSLQNCCLTKTGCGVLPDMLRSMPTLRELYLNDNPLGDAGLQLLCSGLLDPQCHLEKLQVEYCNLTAASCESLASALRAKRHFKELAVSNNELGEAGVRVLCRGLVDSACQLEVLKLENCGLTSASCEDLCGVVASKPSLQELDLGDNKLGDQGIATLCPFLLHPSCQIRVLWLWDCDITTAGCRDLCRVLRAKESLKELSLAGNALGDEGARLLCESLLEPACQLESLWVKSCSFTAASCQHFSSMLTRNTCLVELQLSNNKLGDCGVQQLCQGLSQPGSALQVLWLGDCDVTHSGCASLASVLLVNRSLRELDLSNNCMGEEGILRLMESVEQPGCVLEQLVLYDIYWSEEMDNSLRALEERKPSLRVIF

SEQ ID NO: 179 - DNA, 1404 bp, synthetic construct
  misc_feature 1..1404: note = Variant of RNase inhibitor
  source 1..1404: mol_type = other DNA
atgcaccatcatcatcatcatggcggtagcggcaccatgtctctggatattcagtgtcaacaattgtcagatgcgcgttggacggaactgttaccgcttctgcaacagagcgaagtggtgcgcctggatgactgcggcctcactgagatgcgctgcaaagacatcagtagtgcactgcaagccaacccatcgttgaccgaattaagcctgtgtacaaatgagctgggtgatgctggagttcatttagtcctgcagggcttgcagtctcctacctgcaagattgaaaaactgtccctccagaactgttgtctgacgaagactggttgcggtgtattaccggacatgcttcgttcaatgcccaccctgcgcgaactgtatctgaatgataacccgttgggcgatgcgggcctccagctgctttgctccgggctgttagacccgcaatgtcacctggagaaactgcaggtggaatactgcaatctcacagcagcctcgtgcgaaagcttggcgagcgctctgcgtgccaaacgccattttaaagaattagcggtttcgaacaacgaactgggtgaagcaggcgtgcgcgtactttgtcgtgggctggtggatagtgcgtgccaactggaggttctgaaactggaaaattgtggattgacctctgcctcctgcgaggatctttgtggtgtggtcgctagcaaaccaagcctccaggaattggaccttggcgataacaaattaggtgaccaaggcatcgcaacgttatgcccgtttctgcttcacccttcatgccagattcgtgttttgtggctctgggattgtgatatcaccaccgccggctgccgcgacctctgtcgtgtattacgcgcgaaggaatccctcaaagagctgagtcttgcgggtaatgccttgggagatgaaggcgcacgtctcttgtgcgaatcgttattagaaccggcgtgccagctcgaaagcctttgggtgaaaagctgttctttcactgctgcttcatgccagcattttagttcgatgttgacgcgcaacacgtgtcttgtcgagctccaattgagcaataataaattaggtgattgtggcgtgcagcagctttgccaagggttatctcaaccaggtacggccctccaggttttgtggttgggcgactgtgatgtagcacatagtggctgtgcaagcttagcttccgtgttgcttgtcaaccgttccttacgcgaactcgaccttagtaacaactgcatgggcgaagaagggattctccgtttgatggagagcctggaacaaccgggatgcgtgcttgaacagttggtcctctatgacatctactggtcggaggagatggataattctttacgtgccttagaagagcgcaaaccgtcattgcgcgtgattttc

SEQ ID NO: 180 - protein, 468 aa, synthetic construct
  REGION 1..468: note = Variant of RNase inhibitor
MHHHHHHGGSGTMSLDIQCQQLSDARWTELLPLLQQSEVVRLDDCGLTEMRCKDISSALQANPSLTELSLCTNELGDAGVHLVLQGLQSPTCKIEKLSLQNCCLTKTGCGVLPDMLRSMPTLRELYLNDNPLGDAGLQLLCSGLLDPQCHLEKLQVEYCNLTAASCESLASALRAKRHFKELAVSNNELGEAGVRVLCRGLVDSACQLEVLKLENCGLTSASCEDLCGVVASKPSLQELDLGDNKLGDQGIATLCPFLLHPSCQIRVLWLWDCDITTAGCRDLCRVLRAKESLKELSLAGNALGDEGARLLCESLLEPACQLESLWVKSCSFTAASCQHFSSMLTRNTCLVELQLSNNKLGDCGVQQLCQGLSQPGTALQVLWLGDCDVAHSGCASLASVLLVNRSLRELDLSNNCMGEEGILRLMESLEQPGCVLEQLVLYDIYWSEEMDNSLRALEERKPSLRVIF

SEQ ID NO: 181 - DNA, 1404 bp, synthetic construct
  misc_feature 1..1404: note = Variant of RNase inhibitor
  source 1..1404: mol_type = other DNA
atgcaccatcatcatcatcatggcggtagcggcaccatgtctctggatattcagtgtcaacaattgtcagatgcgcgttggacggaactgttaccgcttctgcaacagagcgaagtggtgcgcctggatgactgcggcctcactgagatgcgctgcaaagacatcagtagtgcactgcaagccaacccatcgttgaccgaattaagcctgtgtacaaatgagctgggtgatgctggagttcatttagtcctgcagggcttgcagtctcctacctgcaagattgaaaaactgtccctccagaactgttgtctgacgaagactggttgcggtgtattaccggacatgcttcgttcaatgcccaccctgcgcgaactgtatctgaatgataacccgttgggcgatgcgggcctccagctgctttgctccgggctgttagacccgcaatgtcacctggagaaactgcaggtggaatactgcaatctcacagcagcctcgtgcaaaagcttggcgagcgctctgcgtgccaaacgccattttaaagaattagcggtttcgaacaacgaactgggtgaagcaggcgtgcgcgtactttgtcgtgggctggtggatagtgcgtgccaactggaggttctgaaactggaaaattgtggattgacctctgcctcctgcgaggatctttgtggtgtggtcgctagcaaaccaagcctccaggaattggaccttggcgataacaaattaggtgaccaaggcatcgcaacgttatgcccgtttctgcttcacccttcatgccagattcgtgttttgtggctctgggattgtgatatcaccaccgccggctgccgcgacctctgtcgtgtattacgcgcgaaggaatccctcaaagagctgagtcttgcgggtaatgccttgggagatgaaggcgcacgtctcttgtgcgaatcgttattagaaccggcgtgccagctcgaaagcctttgggtgaaaagctgttctttcactgctgcttcatgccagcattttagttcgatgttgacgcgcaacacgtgtcttgtcgagctccaattgagcaataataaattaggtgattgtggcgtgcagcagctttgccaagggttatctcaaccaggtgcggccctccaggttttgtggttgggcgactgtgatgtatcgcatagtggctgtgcaagcttagcttccgtgttgcttgtcaaccgttccttacgcgaactcgaccttagtaacaactgcatgggcgaagaagggattctccgtttgatggagagcctggaacaaccgggatgcgtgcttgaacagttggtcctctatgacatctactggtcggaggagatggataattctttacgtgccttagaagagcgcaaaccgtcattgcgcgtgattttc

SEQ ID NO: 182 - protein, 468 aa, synthetic construct
  REGION 1..468: note = Variant of RNase inhibitor
MHHHHHHGGSGTMSLDIQCQQLSDARWTELLPLLQQSEVVRLDDCGLTEMRCKDISSALQANPSLTELSLCTNELGDAGVHLVLQGLQSPTCKIEKLSLQNCCLTKTGCGVLPDMLRSMPTLRELYLNDNPLGDAGLQLLCSGLLDPQCHLEKLQVEYCNLTAASCKSLASALRAKRHFKELAVSNNELGEAGVRVLCRGLVDSACQLEVLKLENCGLTSASCEDLCGVVASKPSLQELDLGDNKLGDQGIATLCPFLLHPSCQIRVLWLWDCDITTAGCRDLCRVLRAKESLKELSLAGNALGDEGARLLCESLLEPACQLESLWVKSCSFTAASCQHFSSMLTRNTCLVELQLSNNKLGDCGVQQLCQGLSQPGAALQVLWLGDCDVSHSGCASLASVLLVNRSLRELDLSNNCMGEEGILRLMESLEQPGCVLEQLVLYDIYWSEEMDNSLRALEERKPSLRVIF

SEQ ID NO: 183 - DNA, 1404 bp, synthetic construct
  misc_feature 1..1404: note = Variant of RNase inhibitor
  source 1..1404: mol_type = other DNA
atgcaccatcatcatcatcatggcggtagcggcaccatgtctctggatattcagtgtcaacaattgtcagatgcgcgttggacggaactgttaccgcttctgcaacagagcgaagtggtgcgcctggatgactgcggcctcactgagatgcgctgcaaagacatcagtagtgcactgcaagccaacccatcgttgaccgaattaagcctgtgtacaaatgagctgggtgatgctggagttcatttagtcctgcagggcttgcagtctcctacctgcaagattgaaaaactgtccctccagaactgttgtctgacgaagactggttgcggtgtattaccggacatgcttcgttcaatgcccaccctgcgcgaactgtatctgaatgataacccgttgggcgatgcgggcctccagctgctttgctccgggctgttagacccgcaatgtcacctggagaaactgcaggtggaatactgcaatctcacagcagcctcgtgcgaaagcttggcgagcgctctgcgtgccaaacgccattttaaagaattagcggtttcgaacaacgaactgggtgaagcaggcgtgcgcgtactttgtcgtgggctggtggatagtgcgtgccaactggaggttctgaaactggaaaattgtggattgacctctgcctcctgcgaggatctttgtggtgtggtcgctagcaaaccaagcctccaggaattggaccttggcgataacaaattaggtgaccaaggcatcgcaacgttatgcccgcgcctgcttcacccttcatgccagattcgtgttttgtggctctgggattgtgatatcaccaccgccggctgccgcgacctctgtcgtgtattacgcgcgaaggaatccctcaaagagctgagtcttgcgggtaatgccttgggagatgaaggcgcacgtctcttgtgcgaatcgttattagaaccggcgtgccagctcgaaagcctttgggtgaaaagctgttctttcactgctgcttcatgccagcattttagttcgatgttgacgcgcaacacgtgtcttgtcgagctccaattgagcaataataaattaggtgattgtggcgtgcagcagctttgccaagggttatctcaaccaggtgcggccctccaggttttgtggttgggcgactgtgatgtaacgcatagtggctgtgcaagcttagcttccgtgttgcttgtcaaccgttccttacgcgaactcgaccttagtaacaactgcatgggcgaagaagggattctccgtttgatggagagcctggaacaaccgggatgcgtgcttgaacagttggtcctctatgacatctactggtcggaggagatggataattctttacgtgccttagaagagcgcaaaccgtcattgcgcgtgattttc

SEQ ID NO: 184 - protein, 468 aa, synthetic construct
  REGION 1..468: note = Variant of RNase inhibitor
MHHHHHHGGSGTMSLDIQCQQLSDARWTELLPLLQQSEVVRLDDCGLTEMRCKDISSALQANPSLTELSLCTNELGDAGVHLVLQGLQSPTCKIEKLSLQNCCLTKTGCGVLPDMLRSMPTLRELYLNDNPLGDAGLQLLCSGLLDPQCHLEKLQVEYCNLTAASCESLASALRAKRHFKELAVSNNELGEAGVRVLCRGLVDSACQLEVLKLENCGLTSASCEDLCGVVASKPSLQELDLGDNKLGDQGIATLCPRLLHPSCQIRVLWLWDCDITTAGCRDLCRVLRAKESLKELSLAGNALGDEGARLLCESLLEPACQLESLWVKSCSFTAASCQHFSSMLTRNTCLVELQLSNNKLGDCGVQQLCQGLSQPGAALQVLWLGDCDVTHSGCASLASVLLVNRSLRELDLSNNCMGEEGILRLMESLEQPGCVLEQLVLYDIYWSEEMDNSLRALEERKPSLRVIF

SEQ ID NO: 185 - DNA, 1404 bp, synthetic construct
  misc_feature 1..1404: note = Variant of RNase inhibitor
  source 1..1404: mol_type = other DNA
atgcaccatcatcatcatcatggcggtagcggcaccatgtctctggatattcagtgtcaacaattgtcagatgcgcgttggacggaactgttaccgcttctgcaacagagcgaagtggtgcgcctggatgactgcggcctcactgagatgcgctgcaaagacatcagtagtgcactgcaagccaacccatcgttgaccgaattaagcctgtgtacaaatgagctgggtgatgctggagttcatttagtcctgcagggcttgcagtctcctacctgcaagattgaaaaactgtccctccagaactgttgtctgacgaagactggttgcggtgtattaccggacatgcttcgttcaatgcccaccctgcgcgaactgtatctgaatgataacccgttgggcgatgcgggcctccagctgctttgctccgggctgttagacccgcaatgtcacctggagaaactgcaggtggaatactgcaatctcacagcagcctcgtgcgaaagcttggcgagcgctctgcgtgccaaacgccattttaaagaattagcggtttcgaacaacgaactgggtgaagcaggcgtgcgcgtactttgtcgtgggctggtggatagtgcgtgccaactggaggttctgaaactggaaaattgtggattgacctctgcctcctgcgaggatctttgtggtgtggtcgctagcaaaccaagcctccaggaattggaccttggcgataacaaattaggtgaccaaggcatcgcaacgttatgcccgtttctgcttcacccttcatgccagattcgtgttttgtggctctgggattgtgatatcaccaccgccggctgccgcgacctctgtcgtgtattacgcgcgaaggaatccctcaaagagctgagtcttgcgggtaatgccttgggagatgaaggcgcacgtctcttgtgcgaatcgttattagaaccggcgtgccagctcgaaagcctttgggtgaaaagctgttctttcactgctgcttcatgccagcattttagttcgatgttgacgcgcaacacgtgtcttgtcgagctccaattgagcaataataaattaggtgattgtggcgtgcagcagctttgccaagggttatctcaaccaggtgcggccctccaggttttgtggttgggcgactgtgatgtaacgcatagtggctgtgcaagcttagcttccgtgttgcttgtcaaccgttccttacgcgaactcgaccttagtaacaactgcatgggcgaagaagggattctccgtttgatggagagcctggaacaaccgggatgcgtgcttgaacagttggtcctctatgacatctactggtcggaggagatggataattctttacgtgccttagaagagcgcaaaccgtcattgcgcgtgattttc

SEQ ID NO: 186 - protein, 468 aa, synthetic construct
  REGION 1..468: note = Variant of RNase inhibitor
MHHHHHHGGSGTMSLDIQCQQLSDARWTELLPLLQQSEVVRLDDCGLTEMRCKDISSALQANPSLTELSLCTNELGDAGVHLVLQGLQSPTCKIEKLSLQNCCLTKTGCGVLPDMLRSMPTLRELYLNDNPLGDAGLQLLCSGLLDPQCHLEKLQVEYCNLTAASCESLASALRAKRHFKELAVSNNELGEAGVRVLCRGLVDSACQLEVLKLENCGLTSASCEDLCGVVASKPSLQELDLGDNKLGDQGIATLCPFLLHPSCQIRVLWLWDCDITTAGCRDLCRVLRAKESLKELSLAGNALGDEGARLLCESLLEPACQLESLWVKSCSFTAASCQHFSSMLTRNTCLVELQLSNNKLGDCGVQQLCQGLSQPGAALQVLWLGDCDVTHSGCASLASVLLVNRSLRELDLSNNCMGEEGILRLMESLEQPGCVLEQLVLYDIYWSEEMDNSLRALEERKPSLRVIF

SEQ ID NO: 187 - DNA, 1404 bp, synthetic construct
  misc_feature 1..1404: note = Variant of RNase inhibitor
  source 1..1404: mol_type = other DNA
atgcaccatcatcatcatcatggcggtagcggcaccatgtctctggatattcagtgtcaacaattgtcagatgcgcgttggacggaactgttaccgcttctgcaacagagcgaagtggtgcgcctggatgactgcggcctcactgagatgcgctgcaaagacatcagtagtgcactgcaagccaacccatcgttgaccgaattaagcctgtgtacaaatgagctgggtgatgctggagttcatttagtcctgcagggcttgcagtctcctacctgcaagattgaaaaactgtccctccagaactgttgtctgacgaagactggttgcggtgtattaccggacatgcttcgttcaatgcccaccctgcgcgaactgtatctgaatgataacccgttgggcgatgcgggcctccagctgctttgctccgggctgttagacccgcaatgtcacctggagaaactgcaggtggaatactgcaatctcacagcagcctcgtgcgaaagcttggcgagcgctctgcgtgccaaacgccattttaaagaattagcggtttcgaacaacgaactgggtgaagcaggcgtgcgcgtactttgtcgtgggctggtggatagtgcgtgccaactggaggttctgaaactggaaaattgtggattgacctctgcctcctgcgaggatctttgtggtgtggtcgctagcaaaccaagcctccaggaattggaccttggcgataacaaattaggtgaccaaggcatcgcaacgttatgcccgcgcctgcttcacccttcatgccagattcgtgttttgtggctctgggattgtgatatcaccaccgccggctgccgcgacctctgtcgtgtattacgcgcgaaggaatccctcaaagagctgagtcttgcgggtaatgccttgggagatgaaggcgcacgtctcttgtgcgaatcgttattagaaccggcgtgccagctccaaagcctttgggtgaaaagctgttctttcactgctgcttcatgccagcattttagttcgatgttgacgcgcaacacgtgtcttgtcgagctccaattgagcaataataaattaggtgattgtggcgtgcagcagctttgccaagggttatctcaaccaggtacggccctccaggttttgtggttgggcgactgtgatgtatcgcatagtggctgtgcaagcttagcttccgtgttgcttgtcaaccgttccttacgcgaactcgaccttagtaacaactgcatgggcgaagaagggattctccgtttgatggagagcctggaacaaccgggatgcgtgcttgaacagttggtcctctatgacatctactggtcggaggagatggataattctttacgtgccttagaagagcgcaaaccgtcattgcgcgtgattttc

SEQ ID NO: 188 - protein, 468 aa, synthetic construct
  REGION 1..468: note = Variant of RNase inhibitor
MHHHHHHGGSGTMSLDIQCQQLSDARWTELLPLLQQSEVVRLDDCGLTEMRCKDISSALQANPSLTELSLCTNELGDAGVHLVLQGLQSPTCKIEKLSLQNCCLTKTGCGVLPDMLRSMPTLRELYLNDNPLGDAGLQLLCSGLLDPQCHLEKLQVEYCNLTAASCESLASALRAKRHFKELAVSNNELGEAGVRVLCRGLVDSACQLEVLKLENCGLTSASCEDLCGVVASKPSLQELDLGDNKLGDQGIATLCPRLLHPSCQIRVLWLWDCDITTAGCRDLCRVLRAKESLKELSLAGNALGDEGARLLCESLLEPACQLQSLWVKSCSFTAASCQHFSSMLTRNTCLVELQLSNNKLGDCGVQQLCQGLSQPGTALQVLWLGDCDVSHSGCASLASVLLVNRSLRELDLSNNCMGEEGILRLMESLEQPGCVLEQLVLYDIYWSEEMDNSLRALEERKPSLRVIF

SEQ ID NO: 189 - DNA, 1404 bp, synthetic construct
  misc_feature 1..1404: note = Variant of RNase inhibitor
  source 1..1404: mol_type = other DNA
atgcaccatcatcatcatcatggcggtagcggcaccatgtctctggatattcagtgtcaacaattgtcagatgcgcgttggacggaactgttaccgcttctgcaacagagcgaagtggtgcgcctggatgactgcggcctcactgagatgcgctgcaaagacatcagtagtgcactgcaagccaacccatcgttgaccgaattaagcctgtgtacaaatgagctgggtgatgctggagttcatttagtcctgcagggcttgcagtctcctacctgcaagattgaaaaactgtccctccagaactgttgtctgacgaagactggttgcggtgtattaccggacatgcttcgttcaatgcccaccctgcgcgaactgtatctgaatgataacccgttgggcgatgcgggcctccagctgctttgctccgggctgttagacccgcaatgtcacctggagaaactgcaggtggaatactgcaatctcacagcagcctcgtgcgaaagcttggcgagcgctctgcgtgccaaacgccattttaaagaattagcggtttcgaacaacgaactgggtgaagcaggcgtgcgcgtactttgtcgtgggctggtggatagtgcgtgccaactggaggttctgaaactggaaaattgtggattgacctctgcctcctgcgaggatctttgtggtgtggtcgctagcaaaccaagcctccaggaattggaccttggcgataacaaattaggtgaccaaggcatcgcaacgttatgcccgtttctgcttcacccttcatgccagattcgtgttttgtggctctgggattgtgatatcaccaccgccggctgccgcgacctctgtcgtgtattacgcgcgaaggaatccctcaaagagctgagtcttgcgggtaatgccttgggagatgaaggcgcacgtctcttgtgcgaatcgttattagaaccggcgtgccagctccaaagcctttgggtgaaaagctgttctttcactgctgcttcatgccagcattttagttcgatgttgacgcgcaacacgtgtcttgtcgagctccaattgagcaataataaattaggtgattgtggcgtgcagcagctttgccaagggttatctcaaccaggtacggccctccaggttttgtggttgggcgactgtgatgtatcgcatagtggctgtgcaagcttagcttccgtgttgcttgtcaaccgttccttacgcgaactcgaccttagtaacaactgcatgggcgaagaagggattctccgtttgatggagagcgtggaacaaccgggatgcgtgcttgaacagttggtcctctatgacatctactggtcggaggagatggataattctttacgtgccttagaagagcgcaaaccgtcattgcgcgtgattttc

SEQ ID NO: 190 - protein, 468 aa, synthetic construct
  REGION 1..468: note = Variant of RNase inhibitor
MHHHHHHGGSGTMSLDIQCQQLSDARWTELLPLLQQSEVVRLDDCGLTEMRCKDISSALQANPSLTELSLCTNELGDAGVHLVLQGLQSPTCKIEKLSLQNCCLTKTGCGVLPDMLRSMPTLRELYLNDNPLGDAGLQLLCSGLLDPQCHLEKLQVEYCNLTAASCESLASALRAKRHFKELAVSNNELGEAGVRVLCRGLVDSACQLEVLKLENCGLTSASCEDLCGVVASKPSLQELDLGDNKLGDQGIATLCPFLLHPSCQIRVLWLWDCDITTAGCRDLCRVLRAKESLKELSLAGNALGDEGARLLCESLLEPACQLQSLWVKSCSFTAASCQHFSSMLTRNTCLVELQLSNNKLGDCGVQQLCQGLSQPGTALQVLWLGDCDVSHSGCASLASVLLVNRSLRELDLSNNCMGEEGILRLMESVEQPGCVLEQLVLYDIYWSEEMDNSLRALEERKPSLRVIF

SEQ ID NO: 191 - DNA, 1404 bp, synthetic construct
  misc_feature 1..1404: note = Variant of RNase inhibitor
  source 1..1404: mol_type = other DNA
atgcaccatcatcatcatcatggcggtagcggcaccatgtctctggatattcagtgtcaacaattgtcagatgcgcgttggacggaactgttaccgcttctgcaacagagcgaagtggtgcgcctggatgactgcggcctcactgagatgcgctgcaaagacatcagtagtgcactgcaagccaacccatcgttgaccgaattaagcctgtgtacaaatgagctgggtgatgctggagttcatttagtcctgcagggcttgcagtctcctacctgcaagattgaaaaactgtccctccagaactgttgtctgacgaagactggttgcggtgtattaccggacatgcttcgttcaatgcccaccctgcgcgaactgtatctgaatgataacccgttgggcgatgcgggcctccagctgctttgctccgggctgttagacccgcaatgtcacctggagaaactgcaggtggaatactgcaatctcacagcagcctcgtgcgaaagcttggcgagcgctctgcgtgccaaacgccattttaaagaattagcggtttcgaacaacgaactgggtgaagcaggcgtgcgcgtactttgtcgtgggctggtggatagtgcgtgccaactggaggttctgaaactggaaaattgtggattgacctctgcctcctgcgaggatctttgtggtgtggtcgctagcaaaccaagcctccaggaattggaccttggcgataacaaattaggtgaccaaggcatcgcaacgttatgcccgcgcctgcttcacccttcatgccagattcgtgttttgtggctctgggattgtgatatcaccaccgccggctgccgcgacctctgtcgtgtattacgcgcgaaggaatccctcaaagagctgagtcttgcgggtaatgccttgggagatgaaggcgcacgtctcttgtgcgaatcgttattagaaccggcgtgccagctccagagcctttgggtgaaaagctgttctttcactgctgcttcatgccagcattttagttcgatgttgacgcgcaacacgtgtcttgtcgagctccaattgagcaataataaattaggtgattgtggcgtgcagcagctttgccaagggttatctcaaccaggtacggccctccaggttttgtggttgggcgactgtgatgtatcgcatagtggctgtgcaagcttagcttccgtgttgcttgtcaaccgttccttacgcgaactcgaccttagtaacaactgcatgggcgaagaagggattctccgtttgatggagagcgtggaacaaccgggatgcgtgcttgaacagttggtcctctatgacatctactggtcggaggagatggataattctttacgtgccttagaagagcgcaaaccgtcattgcgcgtgattttc

SEQ ID NO: 192 - protein, 468 aa, synthetic construct
  REGION 1..468: note = Variant of RNase inhibitor
MHHHHHHGGSGTMSLDIQCQQLSDARWTELLPLLQQSEVVRLDDCGLTEMRCKDISSALQANPSLTELSLCTNELGDAGVHLVLQGLQSPTCKIEKLSLQNCCLTKTGCGVLPDMLRSMPTLRELYLNDNPLGDAGLQLLCSGLLDPQCHLEKLQVEYCNLTAASCESLASALRAKRHFKELAVSNNELGEAGVRVLCRGLVDSACQLEVLKLENCGLTSASCEDLCGVVASKPSLQELDLGDNKLGDQGIATLCPRLLHPSCQIRVLWLWDCDITTAGCRDLCRVLRAKESLKELSLAGNALGDEGARLLCESLLEPACQLQSLWVKSCSFTAASCQHFSSMLTRNTCLVELQLSNNKLGDCGVQQLCQGLSQPGTALQVLWLGDCDVSHSGCASLASVLLVNRSLRELDLSNNCMGEEGILRLMESVEQPGCVLEQLVLYDIYWSEEMDNSLRALEERKPSLRVIF

SEQ ID NO: 193 - DNA, 1404 bp, synthetic construct
  misc_feature 1..1404: note = Variant of RNase inhibitor
  source 1..1404: mol_type = other DNA
atgcaccatcatcatcatcatggcggtagcggcaccatgtctctggatattcagtgtcaacaattgtcagatgcgcgttggacggaactgttaccgcttctgcaacagagcgaagtggtgcgcctggatgactgcggcctcactgagatgcgctgcaaagacatcagtagtgcactgcaagccaacccatcgttgaccgaattaagcctgtgtacaaatgagctgggtgatgctggagttcatttagtactgcagggcttgcagtctcctacctgcaagattgaaaaactgtccctccagaactgttgtctgacgaagactggttgcggtgtattaccggacatgcttcgttcaatgcccaccctgcgcgaactgtatctgaatgataacccgttgggcgatgcgggcctccagctgctttgctccgggctgttagacccgcaatgtcacctggagaaactgcaggtggaatactgcaatctcacagcagcctcgtgcgaaagcttggcgagcgctctgcgtgccaaacgccattttaaagaattagcggtttcgaacaacgaactgggtgaagcaggcgtgcgcgtactttgtcgtgggctggtggatagtgcgtgccaactggaggttctgaaactggaaaattgtggattgacctctgcctcctgcgaggatctttgtggtgtggtcgctagcaaaccaagcctccaggaattggaccttggcgataacaaattaggtgaccaaggcatcgcaacgttatgcccgtttctgcttcacccttcatgccagattcgtgttttgtggctctgggattgtgatatcaccaccgccggctgccgcgacctctgtcgtgtattacgcgcgaaggaatccctcaaagagctgagtcttgcgggtaatgccttgggagatgaaggcgcacgtctcttgtgcgaatcgttattagaaccggcgtgccagctcgaaagcctttgggtgaaaagctgttctttcactgctgcttcatgccagcattttagttcgatgttgacgcgcaacacgtgtcttgtcgagctccaattgagcaataataaattaggtgattgtggcgtgcagcagctttgccaagggttatctcaaccaggttcggccctccaggttttgtggttgggcgactgtgatgtatcgcatagtggctgtgcaagcttagcttccgtgttgcttgtcaaccgttccttacgcgaactcgaccttagtaacaactgcatgggcgaagaagggattctccgtttgatggagagcctggaacaaccgggatgcgtgcttgaacagttggtcctctatgacatctactggtcggaggagatggataattctttacgtgccttagaagagcgcaaaccgtcattgcgcgtgattttc

SEQ ID NO: 194 - protein, 468 aa, synthetic construct
  REGION 1..468: note = Variant of RNase inhibitor
MHHHHHHGGSGTMSLDIQCQQLSDARWTELLPLLQQSEVVRLDDCGLTEMRCKDISSALQANPSLTELSLCTNELGDAGVHLVLQGLQSPTCKIEKLSLQNCCLTKTGCGVLPDMLRSMPTLRELYLNDNPLGDAGLQLLCSGLLDPQCHLEKLQVEYCNLTAASCESLASALRAKRHFKELAVSNNELGEAGVRVLCRGLVDSACQLEVLKLENCGLTSASCEDLCGVVASKPSLQELDLGDNKLGDQGIATLCPFLLHPSCQIRVLWLWDCDITTAGCRDLCRVLRAKESLKELSLAGNALGDEGARLLCESLLEPACQLESLWVKSCSFTAASCQHFSSMLTRNTCLVELQLSNNKLGDCGVQQLCQGLSQPGSALQVLWLGDCDVSHSGCASLASVLLVNRSLRELDLSNNCMGEEGILRLMESLEQPGCVLEQLVLYDIYWSEEMDNSLRALEERKPSLRVIF

SEQ ID NO: 195 - DNA, 1404 bp, synthetic construct
  misc_feature 1..1404: note = Variant of RNase inhibitor
  source 1..1404: mol_type = other DNA
atgcaccatcatcatcatcatggcggtagcggcaccatgtctctggatattcagtgtcaacaattgtcagatgcgcgttggacggaactgttaccgcttctgcaacagagcgaagtggtgcgcctggatgactgcggcctcactgagatgcgctgcaaagacatcagtagtgcactgcaagccaacccatcgttgaccgaattaagcctgtgtacaaatgagctgggtgatgctggagttcatttagtcctgcagggcttgcagtctcctacctgcaagattgaaaaactgtccctccagaactgttgtctgacgaagactggttgcggtgtattaccggacatgcttcgttcaatgcccaccctgcgcgaactgtatctgaatgataacccgttgggcgatgcgggcctccagctgctttgctccgggctgttagacccgcaatgtcacctggagaaactgcaggtggaatactgcaatctcacagcagcctcgtgcgaaagcttggcgagcgctctgcgtgccaaacgccattttaaagaattagcggtttcgaacaacgaactgggtgaagcaggcgtgcgcgtactttgtcgtgggctggtggatagtgcgtgccaactggaggttctgaaactggaaaattgtggattgacctctgcctcctgcgaggatctttgtggtgtggtcgctagcaaaccaagcctccaggaattggaccttggcgataacaaattaggtgaccaaggcatcgcaacgttatgcccgtttctgcttcacccttcatgccagattcgtgttttgtggctctgggattgtgatatcaccaccgccggctgccgcgacctctgtcgtgtattacgcgcgaaggaatccctcaaagagctgagtcttgcgggtaatgccttgggagatgaaggcgcacgtctcttgtgcgaatcgttattagaaccggcgtgccagctcgaaagcctttgggtgaaaagctgttctttcactgctgcttcatgccagcattttagttcgatgttgacgcgcaacacgtgtcttgtcgagctccaattgagcaataataaattaggtgattgtggcgtgcagcagctttgccaagggttatctcaaccaggttcggccctccaggttttgtggttgggcgactgtgatgtaacgcatagtggctgtgcaagcttagcttccgtgttgcttgtcaaccgttccttacgcgaactcgaccttagtaacaactgcatgggcgaagaagggattctccgtttgatggagagcctggaacaaccgggatgcgtgcttgaacagttggtcctctatgacatctactggtcggaggagatggataattctttacgtgccttagaagagcgcaaaccgtcattgcgcgtgattttc

SEQ ID NO: 196 - protein, 468 aa, synthetic construct
  REGION 1..468: note = Variant of RNase inhibitor
MHHHHHHGGSGTMSLDIQCQQLSDARWTELLPLLQQSEVVRLDDCGLTEMRCKDISSALQANPSLTELSLCTNELGDAGVHLVLQGLQSPTCKIEKLSLQNCCLTKTGCGVLPDMLRSMPTLRELYLNDNPLGDAGLQLLCSGLLDPQCHLEKLQVEYCNLTAASCESLASALRAKRHFKELAVSNNELGEAGVRVLCRGLVDSACQLEVLKLENCGLTSASCEDLCGVVASKPSLQELDLGDNKLGDQGIATLCPFLLHPSCQIRVLWLWDCDITTAGCRDLCRVLRAKESLKELSLAGNALGDEGARLLCESLLEPACQLESLWVKSCSFTAASCQHFSSMLTRNTCLVELQLSNNKLGDCGVQQLCQGLSQPGSALQVLWLGDCDVTHSGCASLASVLLVNRSLRELDLSNNCMGEEGILRLMESLEQPGCVLEQLVLYDIYWSEEMDNSLRALEERKPSLRVIF

SEQ ID NO: 197 - DNA, 1404 bp, synthetic construct
  misc_feature 1..1404: note = Variant of RNase inhibitor
  source 1..1404: mol_type = other DNA
atgcaccatcatcatcatcatggcggtagcggcaccatgtctctggatattcagtgtcaacaattgtcagatgcgcgttggacggaactgttaccgcttctgcaacagagcgaagtggtgcgcctggatgactgcggcctcactgagatgcgctgcaaagacatcagtagtgcactgcaagccaacccatcgttgaccgaattaagcctgtgtacaaatgagctgggtgatgctggagttcatttagtcctgcagggcttgcagtctcctacctgcaagattgaaaaactgtccctccagaactgttgtctgacgaagactggttgcggtgtattaccggacatgcttcgttcaatgcccaccctgcgcgaactgtatctgaatgataacccgttgggcgatgcgggcctccagctgctttgctccgggctgttagacccgcaatgtcacctggagaaactgcaggtggaatactgcaatctcacagcagcctcgtgcgaaagcttggcgagcgctctgcgtgccaaacgccattttaaagaattagcggtttcgaacaacgaactgggtgaagcaggcgtgcgcgtactttgtcgtgggctggtggatagtgcgtgccaactggaggttctgaaactggaaaattgtggattgacctctgcctcctgcgaggatctttgtggtgtggtcgctagcaaaccaagcctccaggaattggaccttggcgataacaaattaggtgaccaaggcatcgcaacgttatgcccgtttctgcttcacccttcatgccagattcgtgttttgtggctctgggattgtgatatcaccaccgccggctgccgcgacctctgtcgtgtattacgcgcgaaggaatccctcaaagagctgagtcttgcgggtaatgccttgggagatgaaggcgcacgtctcttgtgcgaatcgttattagaaccggcgtgccagctcgaaagcctttgggtgaaaagctgttctttcactgctgcttcatgccagcattttagttcgatgttgacgcgcaacacgtgtcttgtcgagctccaattgagcaataataaattaggtgattgtggcgtgcagcagctttgccaagggttatctcaaccaggttcggccctccaggttttgtggttgggcgactgtgatgtagcacatagtggctgtgcaagcttagcttccgtgttgcttgtcaaccgttccttacgcgaactcgaccttagtaacaactgcatgggcgaagaagggattctccgtttgatggagagcctggaacaaccgggatgcgtgcttgaacagttggtcctctatgacatctactggtcggaggagatggataattctttacgtgccttagaagagcgcaaaccgtcattgcgcgtgattttc

SEQ ID NO: 198 - protein, 468 aa, synthetic construct
  REGION 1..468: note = Variant of RNase inhibitor
MHHHHHHGGSGTMSLDIQCQQLSDARWTELLPLLQQSEVVRLDDCGLTEMRCKDISSALQANPSLTELSLCTNELGDAGVHLVLQGLQSPTCKIEKLSLQNCCLTKTGCGVLPDMLRSMPTLRELYLNDNPLGDAGLQLLCSGLLDPQCHLEKLQVEYCNLTAASCESLASALRAKRHFKELAVSNNELGEAGVRVLCRGLVDSACQLEVLKLENCGLTSASCEDLCGVVASKPSLQELDLGDNKLGDQGIATLCPFLLHPSCQIRVLWLWDCDITTAGCRDLCRVLRAKESLKELSLAGNALGDEGARLLCESLLEPACQLESLWVKSCSFTAASCQHFSSMLTRNTCLVELQLSNNKLGDCGVQQLCQGLSQPGSALQVLWLGDCDVAHSGCASLASVLLVNRSLRELDLSNNCMGEEGILRLMESLEQPGCVLEQLVLYDIYWSEEMDNSLRALEERKPSLRVIF

SEQ ID NO: 199 - DNA, 1404 bp, synthetic construct
  misc_feature 1..1404: note = Variant of RNase inhibitor
  source 1..1404: mol_type = other DNA
atgcaccatcatcatcatcatggcggtagcggcaccatgtctctggatattcagtgtcaacaattgtcagatgcgcgttggacggaactgttaccgcttctgcaacagagcgaagtggtgcgcctggatgactgcggcctcactgagatgcgctgcaaagacatcagtagtgcactgcaagccaacccatcgttgaccgaattaagcctgtgtacaaatgagctgggtgatgctggagttcatttagtcctgcagggcttgcagtctcctacctgcaagattgaaaaactgtccctccagaactgttgtctgacgaagactggttgcggtgtattaccggacatgcttcgttcaatgcccaccctgcgcgaactgtatctgaatgataacccgttgggcgatgcgggcctccagctgctttgctccgggctgttagacccgcaatgtcacctggagaaactgcaggtggaatactgcaatctcacagcagcctcgtgcgaaagcttggcgagcgctctgcgtgccaaacgccattttaaagaattagcggtttcgaacaacgaactgggtgaagcaggcgtgcgcgtactttgtcgtgggctggtggatagtgcgtgccaactggaggttctgaaactggaaaattgtggattgacctctgcctcctgcgaggatctttgtggtgtggtcgctagcaaaccaagcctccaggaattggaccttggcgataacaaattaggtgaccaaggcatcgcaacgttatgcccgtttctgcttcacccttcatgccagattcgtgttttgtggctctgggattgtgatatcaccaccgccggctgccgcgacctctgtcgtgtattacgcgcgaaggaatccctcaaagagctgagtcttgcgggtaatgccttgggagatgaaggcgcacgtctcttgtgcgaatcgttattagaaccggcgtgccagctccaaagcctttgggtgaaaagctgttctttcactgctgcttcatgccagcattttagttcgatgttgacgcgcaacacgtgtcttgtcgagctccaattgagcaataataaattaggtgattgtggcgtgcagcagctttgccaagggttatctcaaccaggttcggccctccaggttttgtggttgggcgactgtgatgtagcacatagtggctgtgcaagcttagcttccgtgttgcttgtcaaccgttccttacgcgaactcgaccttagtaacaactgcatgggcgaagaagggattctccgtttgatggagagcgttgaacaaccgggatgcgtgcttgaacagttggtcctctatgacatctactggtcggaggagatggataattctttacgtgccttagaagagcgcaaaccgtcattgcgcgtgattttc

SEQ ID NO: 200 - protein, 468 aa, synthetic construct
  REGION 1..468: note = Variant of RNase inhibitor
MHHHHHHGGSGTMSLDIQCQQLSDARWTELLPLLQQSEVVRLDDCGLTEMRCKDISSALQANPSLTELSLCTNELGDAGVHLVLQGLQSPTCKIEKLSLQNCCLTKTGCGVLPDMLRSMPTLRELYLNDNPLGDAGLQLLCSGLLDPQCHLEKLQVEYCNLTAASCESLASALRAKRHFKELAVSNNELGEAGVRVLCRGLVDSACQLEVLKLENCGLTSASCEDLCGVVASKPSLQELDLGDNKLGDQGIATLCPFLLHPSCQIRVLWLWDCDITTAGCRDLCRVLRAKESLKELSLAGNALGDEGARLLCESLLEPACQLQSLWVKSCSFTAASCQHFSSMLTRNTCLVELQLSNNKLGDCGVQQLCQGLSQPGSALQVLWLGDCDVAHSGCASLASVLLVNRSLRELDLSNNCMGEEGILRLMESVEQPGCVLEQLVLYDIYWSEEMDNSLRALEERKPSLRVIF

SEQ ID NO: 201 - DNA, 1404 bp, synthetic construct
  misc_feature 1..1404: note = Variant of RNase inhibitor
  source 1..1404: mol_type = other DNA
atgcaccatcatcatcatcatggcggtagcggcaccatgtctctggatattcagtgtcaacaattgtcagatgcgcgttggacggaactgttaccgcttctgcaacagagcgaagtggtgcgcctggatgactgcggcctcactgagatgcgctgcaaagacatcagtagtgcactgcaagccaacccatcgttgaccgaattaagcctgtgtacaaatgagctgggtgatgctggagttcatttagtcctgcagggcttgcagtctcctacctgcaagattgaaaaactgtccctccagaactgttgtctgacgaagactggttgcggtgtattaccggacatgcttcgttcaatgcccaccctgcgcgaactgtatctgaatgataacccgttgggcgatgcgggcctccagctgctttgctccgggctgttagacccgcaatgtcacctggagaaactgcaggtggaatactgcaatctcacagcagcctcgtgcgaaagcttggcgagcgctctgcgtgccaaacgccattttaaagaattagcggtttcgaacaacgaactgggtgaagcaggcgtgcgcgtactttgtcgtgggctggtggatagtgcgtgccaactggaggttctgaaactggaaaattgtggattgacctctgcctcctgcgaggatctttgtggtgtggtcgctagcaaaccaagcctccaggaattggaccttggcgataacaaattaggtgaccaaggcatcgcaacgttatgcccgcgcctgcttcacccttcatgccagattcgtgttttgtggctctgggattgtgatatcaccaccgccggctgccgcgacctctgtcgtgtattacgcgcgaaggaatccctcaaagagctgagtcttgcgggtaatgccttgggagatgaaggcgcacgtctcttgtgcgaatcgttattagaaccggcgtgccagctccaaagcctttgggtgaaaagctgttctttcactgctgcttcatgccagcattttagttcgatgttgacgcgcaacacgtgtcttgtcgagctccaattgagcaataataaattaggtgattgtggcgtgcagcagctttgccaagggttatctcaaccaggtgcggccctccaggttttgtggttgggcgactgtgatgtaacgcatagtggctgtgcaagcttagcttccgtgttgcttgtcaaccgttccttacgcgaactcgaccttagtaacaactgcatgggcgaagaagggattctccgtttgatggagagcctggaacaaccgggatgcgtgcttgaacagttggtcctctatgacatctactggtcggaggagatggataattctttacgtgccttagaagagcgcaaaccgtcattgcgcgtgattttc

SEQ ID NO: 202 - protein, 468 aa, synthetic construct
  REGION 1..468: note = Variant of RNase inhibitor
MHHHHHHGGSGTMSLDIQCQQLSDARWTELLPLLQQSEVVRLDDCGLTEMRCKDISSALQANPSLTELSLCTNELGDAGVHLVLQGLQSPTCKIEKLSLQNCCLTKTGCGVLPDMLRSMPTLRELYLNDNPLGDAGLQLLCSGLLDPQCHLEKLQVEYCNLTAASCESLASALRAKRHFKELAVSNNELGEAGVRVLCRGLVDSACQLEVLKLENCGLTSASCEDLCGVVASKPSLQELDLGDNKLGDQGIATLCPRLLHPSCQIRVLWLWDCDITTAGCRDLCRVLRAKESLKELSLAGNALGDEGARLLCESLLEPACQLQSLWVKSCSFTAASCQHFSSMLTRNTCLVELQLSNNKLGDCGVQQLCQGLSQPGAALQVLWLGDCDVTHSGCASLASVLLVNRSLRELDLSNNCMGEEGILRLMESLEQPGCVLEQLVLYDIYWSEEMDNSLRALEERKPSLRVIF

SEQ ID NO: 203 - DNA, 1404 bp, synthetic construct
  misc_feature 1..1404: note = Variant of RNase inhibitor
  source 1..1404: mol_type = other DNA
atgcaccatcatcatcatcatggcggtagcggcaccatgtctctggatattcagtgtcaacaattgtcagatgcgcgttggacggaactgttaccgcttctgcaacagagcgaagtggtgcgcctggatgactgcggcctcactgagatgcgctgcaaagacatcagtagtgcactgcaagccaacccatcgttgaccgaattaagcctgtgtacaaatgagctgggtgatgctggagttcatttagtcctgcagggcttgcagtctcctacctgcaagattgaaaaactgtccctccagaactgttgtctgacgaagactggttgcggtgtattaccggacatgcttcgttcaatgcccaccctgcgcgaactgtatctgaatgataacccgttgggcgatgcgggcctccagctgctttgctccgggctgttagacccgcaatgtcacctggagaaactgcaggtggaatactgcaatctcacagcagcctcgtgcgaaagcttggcgagcgctctgcgtgccaaacgccattttaaagaattagcggtttcgaacaacgaactgggtgaagcaggcgtgcgcgtactttgtcgtgggctggtggatagtgcgtgccaactggaggttctgaaactggaaaattgtggattgacctctgcctcctgcgaggatctttgtggtgtggtcgctagcaaaccaagcctccaggaattggaccttggcgataacaaattaggtgaccaaggcatcgcaacgttatgcccgtttctgcttcacccttcatgccagattcgtgttttgtggctctgggattgtgatatcaccaccgccggctgccgcgacctctgtcgtgtattacgcgcgaaggaatccctcaaagagctgagtcttgcgggtaatgccttgggagatgaaggcgcacgtctcttgtgcgaatcgttattagaaccggcgtgccagctcgaaagcctttgggtgaaaagctgttctttcactgctgcttcatgccagcattttagttcgatgttgacgcgcaacacgtgtcttgtcgagctccaattgagcaataataaattaggtgattgtggcgtgcagcagctttgccaagggttatctcaaccaggtacggccctccaggttttgtggttgggcgactgtgatgtatcgcatagtggctgtgcaagcttagcttccgtgttgcttgtcaaccgttccttacgcgaactcgaccttagtaacaactgcatgggcgaagaagggattctccgtttgatggagagcgtggaacaaccgggatgcgtgcttgaacagttggtcctctatgacatctactggtcggaggagatggataattctttacgtgccttagaagagcgcaaaccgtcattgcgcgtgattttc

SEQ ID NO: 204 - protein, 468 aa, synthetic construct
  REGION 1..468: note = Variant of RNase inhibitor
MHHHHHHGGSGTMSLDIQCQQLSDARWTELLPLLQQSEVVRLDDCGLTEMRCKDISSALQANPSLTELSLCTNELGDAGVHLVLQGLQSPTCKIEKLSLQNCCLTKTGCGVLPDMLRSMPTLRELYLNDNPLGDAGLQLLCSGLLDPQCHLEKLQVEYCNLTAASCESLASALRAKRHFKELAVSNNELGEAGVRVLCRGLVDSACQLEVLKLENCGLTSASCEDLCGVVASKPSLQELDLGDNKLGDQGIATLCPFLLHPSCQIRVLWLWDCDITTAGCRDLCRVLRAKESLKELSLAGNALGDEGARLLCESLLEPACQLESLWVKSCSFTAASCQHFSSMLTRNTCLVELQLSNNKLGDCGVQQLCQGLSQPGTALQVLWLGDCDVSHSGCASLASVLLVNRSLRELDLSNNCMGEEGILRLMESVEQPGCVLEQLVLYDIYWSEEMDNSLRALEERKPSLRVIF

SEQ ID NO: 205 - DNA, 1404 bp, synthetic construct
  misc_feature 1..1404: note = Variant of RNase inhibitor
  source 1..1404: mol_type = other DNA
atgcaccatcatcatcatcatggcggtagcggcaccatgtctctggatattcagtgtcaacaattgtcagatgcgcgttggacggaactgttaccgcttctgcaacagagcgaagtggtgcgcctggatgactgcggcctcactgagatgcgctgcaaagacatcagtagtgcactgcaagccaacccatcgttgaccgaattaagcctgtgtacaaatgagctgggtgatgctggagttcatttagtcctgcagggcttgcagtctcctacctgcaagattgaaaaactgtccctccagaactgttgtctgacgaagactggttgcggtgtattaccggacatgcttcgttcaatgcccaccctgcgcgaactgtatctgaatgataacccgttgggcgatgcgggcctccagctgctttgctccgggctgttagacccgcaatgtcacctggagaaactgcaggtggaatactgcaatctcacagcagcctcgtgcgaaagcttggcgagcgctctgcgtgccaaacgccattttaaagaattagcggtttcgaacaacgaactgggtgaagcaggcgtgcgcgtactttgtcgtgggctggtggatagtgcgtgccaactggaggttctgaaactggaaaattgtggattgacctctgcctcctgcgaggatctttgtggtgtggtcgctagcaaaccaagcctccaggaattggaccttggcgataacaaattaggtgaccaaggcatcgcaacgttatgcccgtttctgcttcacccttcatgccagattcgtgttttgtggctctgggattgtgatatcaccaccgccggctgccgcgacctctgtcgtgtattacgcgcgaaggaatccctcaaagagctgagtcttgcgggtaatgccttgggagatgaaggcgcacgtctcttgtgcgaatcgttattagaaccggcgtgccagctcgaaagcctttgggtgaaaagctgttctttcactgctgcttcatgccagcattttagttcgatgttgacgcgcaacacgtgtcttgtcgagctccaattgagcaataataaattaggtgattgtggcgtgcagcagctttgccaagggttatctcaaccaggtacggccctccaggttttgtggttgggcgactgtgatgtatcgcatagtggctgtgcaagcttagcttccgtgttgcttgtcaaccgttccttacgcgaactcgaccttagtaacaactgcatgggcgaagaagggattctccgtttgatggagagcctggaacaaccgggatgcgtgcttgaacagttggtcctctatgacatctactggtcggaggagatggataattctttacgtgccttagaagagcgcaaaccgtcattgcgcgtgattttc

SEQ ID NO: 206 - protein, 468 aa, synthetic construct
  REGION 1..468: note = Variant of RNase inhibitor
MHHHHHHGGSGTMSLDIQCQQLSDARWTELLPLLQQSEVVRLDDCGLTEMRCKDISSALQANPSLTELSLCTNELGDAGVHLVLQGLQSPTCKIEKLSLQNCCLTKTGCGVLPDMLRSMPTLRELYLNDNPLGDAGLQLLCSGLLDPQCHLEKLQVEYCNLTAASCESLASALRAKRHFKELAVSNNELGEAGVRVLCRGLVDSACQLEVLKLENCGLTSASCEDLCGVVASKPSLQELDLGDNKLGDQGIATLCPFLLHPSCQIRVLWLWDCDITTAGCRDLCRVLRAKESLKELSLAGNALGDEGARLLCESLLEPACQLESLWVKSCSFTAASCQHFSSMLTRNTCLVELQLSNNKLGDCGVQQLCQGLSQPGTALQVLWLGDCDVSHSGCASLASVLLVNRSLRELDLSNNCMGEEGILRLMESLEQPGCVLEQLVLYDIYWSEEMDNSLRALEERKPSLRVIF

SEQ ID NO: 207 - DNA, 1404 bp, synthetic construct
  misc_feature 1..1404: note = Variant of RNase inhibitor
  source 1..1404: mol_type = other DNA
atgcaccatcatcatcatcatggcggtagcggcaccatgtctctggatattcagtgtcaacaattgtcagatgcgcgttggacggaactgttaccgcttctgcaacagagcgaagtggtgcgcctggatgactgcggcctcactgagatgcgctgcaaagacatcagtagtgcactgcaagccaacccatcgttgaccgaattaagcctgtgtacaaatgagctgggtgatgctggagttcatttagtcctgcagggcttgcagtctcctacctgcaagattgaaaaactgtccctccagaactgttgtctgacgaagactggttgcggtgtattaccggacatgcttcgttcaatgcccaccctgcgcgaactgtatctgaatgataacccgttgggcgatgcgggcctccagctgctttgctccgggctgttagacccgcaatgtcacctggagaaactgcaggtggaatactgcaatctcacagcagcctcgtgcgaaagcttggcgagcgctctgcgtgccaaacgccattttaaagaattagcggtttcgaacaacgaactgggtgaagcaggcgtgcgcgtactttgtcgtgggctggtggatagtgcgtgccaactggaggttctgaaactggaaaattgtggattgacctctgcctcctgcgaggatctttgtggtgtggtcgctagcaaaccaagcctccaggaattggaccttggcgataacaaattaggtgaccaaggcatcgcaacgttatgcccgtttctgcttcacccttcatgccagattcgtgttttgtggctctgggattgtgatatcaccaccgccggctgccgcgacctctgtcgtgtattacgcgcgaaggaatccctcaaagagctgagtcttgcgggtaatgccttgggagatgaaggcgcacgtctcttgtgcgaatcgttattagaaccggcgtgccagctccaaagcctttgggtgaaaagctgttctttcactgctgcttcatgccagcattttagttcgatgttgacgcgcaacacgtgtcttgtcgagctccaattgagcaataataaattaggtgattgtggcgtgcagcagctttgccaagggttatctcaaccaggtacggccctccaggttttgtggttgggcgactgtgatgtaacgcatagtggctgtgcaagcttagcttccgtgttgcttgtcaaccgttccttacgcgaactcgaccttagtaacaactgcatgggcgaagaagggattctccgtttgatggagagcctggaacaaccgggatgcgtgcttgaacagttggtcctctatgacatctactggtcggaggagatggataattctttacgtgccttagaagagcgcaaaccgtcattgcgcgtgattttc

SEQ ID NO: 208 - protein, 468 aa, synthetic construct
  REGION 1..468: note = Variant of RNase inhibitor
MHHHHHHGGSGTMSLDIQCQQLSDARWTELLPLLQQSEVVRLDDCGLTEMRCKDISSALQANPSLTELSLCTNELGDAGVHLVLQGLQSPTCKIEKLSLQNCCLTKTGCGVLPDMLRSMPTLRELYLNDNPLGDAGLQLLCSGLLDPQCHLEKLQVEYCNLTAASCESLASALRAKRHFKELAVSNNELGEAGVRVLCRGLVDSACQLEVLKLENCGLTSASCEDLCGVVASKPSLQELDLGDNKLGDQGIATLCPFLLHPSCQIRVLWLWDCDITTAGCRDLCRVLRAKESLKELSLAGNALGDEGARLLCESLLEPACQLQSLWVKSCSFTAASCQHFSSMLTRNTCLVELQLSNNKLGDCGVQQLCQGLSQPGTALQVLWLGDCDVTHSGCASLASVLLVNRSLRELDLSNNCMGEEGILRLMESLEQPGCVLEQLVLYDIYWSEEMDNSLRALEERKPSLRVIF

SEQ ID NO: 209 - DNA, 1404 bp, synthetic construct
  misc_feature 1..1404: note = Variant of RNase inhibitor
  source 1..1404: mol_type = other DNA
atgcaccatcatcatcatcatggcggtagcggcaccatgtctctggatattcagtgtcaacaattgtcagatgcgcgttggacggaactgttaccgcttctgcaacagagcgaagtggtgcgcctggatgactgcggcctcactgagatgcgctgcaaagacatcagtagtgcactgcaagccaacccatcgttgaccgaattaagcctgtgtacaaatgagctgggtgatgctggagttcatttagtcctgcagggcttgcagtctcctacctgcaagattgaaaaactgtccctccagaactgttgtctgacgaagactggttgcggtgtattaccggacatgcttcgttcaatgcccaccctgcgcgaactgtatctgaatgataacccgttgggcgatgcgggcctccagctgctttgctccgggctgttagacccgcaatgtcacctggagaaactgcaggtggaatactgcaatctcacagcagcctcgtgcgaaagcttggcgagcgctctgcgtgccaaacgccattttaaagaattagcggtttcgaacaacgaactgggtgaagcaggcgtgcgcgtactttgtcgtgggctggtggatagtgcgtgccaactggaggttctgaaactggaaaattgtggattgacctctgcctcctgcgaggatctttgtggtgtggtcgctagcaaaccaagcctccaggaattggaccttggcgataacaaattaggtgaccaaggcatcgcaacgttatgcccgtttctgcttcacccttcatgccagattcgtgttttgtggctctgggattgtgatatcaccaccgccggctgccgcgacctctgtcgtgtattacgcgcgaaggaatccctcaaagagctgagtcttgcgggtaatgccttgggagatgaaggcgcacgtctcttgtgcgaatcgttattagaaccggcgtgccagctccagagcctttgggtgaaaagctgttctttcactgctgcttcatgccagcattttagttcgatgttgacgcgcaacacgtgtcttgtcgagctccaattgagcaataataaattaggtgattgtggcgtgcagcagctttgccaagggttatctcaaccaggtgcggccctccaggttttgtggttgggcgactgtgatgtaacgcatagtggctgtgcaagcttagcttccgtgttgcttgtcaaccgttccttacgcgaactcgaccttagtaacaactgcatgggcgaagaagggattctccgtttgatggagagcctggaacaaccgggatgcgtgcttgaacagttggtcctctatgacatctactggtcggaggagatggataattctttacgtgccttagaagagcgcaaaccgtcattgcgcgtgattttc

SEQ ID NO: 210 - protein, 468 aa, synthetic construct
  REGION 1..468: note = Variant of RNase inhibitor
MHHHHHHGGSGTMSLDIQCQQLSDARWTELLPLLQQSEVVRLDDCGLTEMRCKDISSALQANPSLTELSLCTNELGDAGVHLVLQGLQSPTCKIEKLSLQNCCLTKTGCGVLPDMLRSMPTLRELYLNDNPLGDAGLQLLCSGLLDPQCHLEKLQVEYCNLTAASCESLASALRAKRHFKELAVSNNELGEAGVRVLCRGLVDSACQLEVLKLENCGLTSASCEDLCGVVASKPSLQELDLGDNKLGDQGIATLCPFLLHPSCQIRVLWLWDCDITTAGCRDLCRVLRAKESLKELSLAGNALGDEGARLLCESLLEPACQLQSLWVKSCSFTAASCQHFSSMLTRNTCLVELQLSNNKLGDCGVQQLCQGLSQPGAALQVLWLGDCDVTHSGCASLASVLLVNRSLRELDLSNNCMGEEGILRLMESLEQPGCVLEQLVLYDIYWSEEMDNSLRALEERKPSLRVIF

SEQ ID NO: 211 - DNA, 1404 bp, synthetic construct
  misc_feature 1..1404: note = Variant of RNase inhibitor
  source 1..1404: mol_type = other DNA
atgcaccatcatcatcatcatggcggtagcggcaccatgtctctggatattcagtgtcaacaattgtcagatgcgcgttggacggaactgttaccgcttctgcaacagagcgaagtggtgcgcctggatgactgcggcctcactgagatgcgctgcaaagacatcagtagtgcactgcaagccaacccatcgttgaccgaattaagcctgtgtacaaatgagctgggtgatgctggagttcatttagtcctgcagggcttgcagtctcctacctgcaagattgaaaaactgtccctccagaactgttgtctgacgaagactggttgcggtgtattaccggacatgcttcgttcaatgcccaccctgcgcgaactgtatctgaatgataacccgttgggcgatgcgggcctccagctgctttgctccgggctgttagacccgcaatgtcacctggagaaactgcaggtggaatactgcaatctcacagcagcctcgtgcgaaagcttggcgagcgctctgcgtgccaaacgccattttaaagaattagcggtttcgaacaacgaactgggtgaagcaggcgtgcgcgtactttgtcgtgggctggtggatagtgcgtgccaactggaggttctgaaactggaaaattgtggattgacctctgcctcctgcgaggatctttgtggtgtggtcgctagcaaaccaagcctccaggaattggaccttggcgataacaaattaggtgaccaaggcatcgcaacgttatgcccgtttctgcttcacccttcatgccagattcgtgttttgtggctctgggattgtgatatcaccaccgccggctgccgcgacctctgtcgtgtattacgcgcgaaggaatccctcaaagagctgagtcttgcgggtaatgccttgggagatgaaggcgcacgtctcttgtgcgaatcgttattagaaccggcgtgccagctccaaagcctttgggtgaaaagctgttctttcactgctgcttcatgccagcattttagttcgatgttgacgcgcaacacgtgtcttgtcgagctccaattgagcaataataaattaggtgattgtggcgtgcagcagctttgccaagggttatctcaaccaggtacggccctccaggttttgtggttgggcgactgtgatgtatcgcatagtggctgtgcaagcttagcttccgtgttgcttgtcaaccgttccttacgcgaactcgaccttagtaacaactgcatgggcgaagaagggattctccgtttgatggagagcctggaacaaccgggatgcgtgcttgaacagttggtcctctatgacatctactggtcggaggagatggataattctttacgtgccttagaagagcgcaaaccgtcattgcgcgtgattttc

SEQ ID NO: 212 - protein, 468 aa, synthetic construct
  REGION 1..468: note = Variant of RNase inhibitor
MHHHHHHGGSGTMSLDIQCQQLSDARWTELLPLLQQSEVVRLDDCGLTEMRCKDISSALQANPSLTELSLCTNELGDAGVHLVLQGLQSPTCKIEKLSLQNCCLTKTGCGVLPDMLRSMPTLRELYLNDNPLGDAGLQLLCSGLLDPQCHLEKLQVEYCNLTAASCESLASALRAKRHFKELAVSNNELGEAGVRVLCRGLVDSACQLEVLKLENCGLTSASCEDLCGVVASKPSLQELDLGDNKLGDQGIATLCPFLLHPSCQIRVLWLWDCDITTAGCRDLCRVLRAKESLKELSLAGNALGDEGARLLCESLLEPACQLQSLWVKSCSFTAASCQHFSSMLTRNTCLVELQLSNNKLGDCGVQQLCQGLSQPGTALQVLWLGDCDVSHSGCASLASVLLVNRSLRELDLSNNCMGEEGILRLMESLEQPGCVLEQLVLYDIYWSEEMDNSLRALEERKPSLRVIF

SEQ ID NO: 213 - DNA, 1404 bp, synthetic construct
  misc_feature 1..1404: note = Variant of RNase inhibitor
  source 1..1404: mol_type = other DNA
atgcaccatcatcatcatcatggcggtagcggcaccatgtctctggatattcagtgtcaacaattgtcagatgcgcgttggacggaactgttaccgcttctgcaacagagcgaagtggtgcgcctggatgactgcggcctcactgagatgcgctgcaaagacatcagtagtgcactgcaagccaacccatcgttgaccgaattaagcctgtgtacaaatgagctgggtgatgctggagttcatttagtcctgcagggcttgcagtctcctacctgcaagattgaaaaactgtccctccagaactgttgtctgacgaagactggttgcggtgtattaccggacatgcttcgttcaatgcccaccctgcgcgaactgtatctgaatgataacccgttgggcgatgcgggcctccagctgctttgctccgggctgttagacccgcaatgtcacctggagaaactgcaggtggaatactgcaatctcacagcagcctcgtgcgaaagcttggcgagcgctctgcgtgccaaacgccattttaaagaattagcggtttcgaacaacgaactgggtgaagcaggcgtgcgcgtactttgtcgtgggctggtggatagtgcgtgccaactggaggttctgaaactggaaaattgtggattgacctctgcctcctgcgaggatctttgtggtgtggtcgctagcaaaccaagcctccaggaattggaccttggcgataacaaattaggtgaccaaggcatcgcaacgttatgcccgtttctgcttcacccttcatgccagattcgtgttttgtggctctgggattgtgatatcaccaccgccggctgccgcgacctctgtcgtgtattacgcgcgaaggaatccctcaaagagctgagtcttgcgggtaatgccttgggagatgaaggcgcacgtctcttgtgcgaatcgttattagaaccggcgtgccagctccaaagcctttgggtgaaaagctgttctttcactgctgcttcatgccagcattttagttcgatgttgacgcgcaacacgtgtcttgtcgagctccaattgagcaataataaattaggtgattgtggcgtgcagcagctttgccaagggttatctcaaccaggttcggccctccaggttttgtggttgggcgactgtgatgtaacgcatagtggctgtgcaagcttagcttccgtgttgcttgtcaaccgttccttacgcgaactcgaccttagtaacaactgcatgggcgaagaagggattctccgtttgatggagagcgtggaacaaccgggatgcgtgcttgaacagttggtcctctatgacatctactggtcggaggagatggataattctttacgtgccttagaagagcgcaaaccgtcattgcgcgtgattttc

SEQ ID NO: 214 - protein, 468 aa, synthetic construct
  REGION 1..468: note = Variant of RNase inhibitor
MHHHHHHGGSGTMSLDIQCQQLSDARWTELLPLLQQSEVVRLDDCGLTEMRCKDISSALQANPSLTELSLCTNELGDAGVHLVLQGLQSPTCKIEKLSLQNCCLTKTGCGVLPDMLRSMPTLRELYLNDNPLGDAGLQLLCSGLLDPQCHLEKLQVEYCNLTAASCESLASALRAKRHFKELAVSNNELGEAGVRVLCRGLVDSACQLEVLKLENCGLTSASCEDLCGVVASKPSLQELDLGDNKLGDQGIATLCPFLLHPSCQIRVLWLWDCDITTAGCRDLCRVLRAKESLKELSLAGNALGDEGARLLCESLLEPACQLQSLWVKSCSFTAASCQHFSSMLTRNTCLVELQLSNNKLGDCGVQQLCQGLSQPGSALQVLWLGDCDVTHSGCASLASVLLVNRSLRELDLSNNCMGEEGILRLMESVEQPGCVLEQLVLYDIYWSEEMDNSLRALEERKPSLRVIF

SEQ ID NO: 215 - DNA, 1404 bp, synthetic construct
  misc_feature 1..1404: note = Variant of RNase inhibitor
  source 1..1404: mol_type = other DNA
atgcaccatcatcatcatcatggcggtagcggcaccatgtctctggatattcagtgtcaacaattgtcagatgcgcgttggacggaactgttaccgcttctgcaacagagcgaagtggtgcgcctggatgactgcggcctcactgagatgcgctgcaaagacatcagtagtgcactgcaagccaacccatcgttgaccgaattaagcctgtgtacaaatgagctgggtgatgctggagttcatttagtcctgcagggcttgcagtctcctacctgcaagattgaaaaactgtccctccagaactgttgtctgacgaagactggttgcggtgtattaccggacatgcttcgttcaatgcccaccctgcgcgaactgtatctgaatgataacccgttgggcgatgcgggcctccagctgctttgctccgggctgttagacccgcaatgtcacctggagaaactgcaggtggaatactgcaatctcacagcagcctcgtgcgaaagcttggcgagcgctctgcgtgccaaacgccattttaaagaattagcggtttcgaacaacgaactgggtgaagcaggcgtgcgcgtactttgtcgtgggctggtggatagtgcgtgccaactggaggttctgaaactggaaaattgtggattgacctctgcctcctgcgaggatctttgtggtgtggtcgctagcaaaccaagcctccaggaattggaccttggcgataacaaattaggtgaccaaggcatcgcaacgttatgcccgtttctgcttcacccttcatgccagattcgtgttttgtggctctgggattgtgatatcaccaccgccggctgccgcgacctctgtcgtgtattacgcgcgaaggaatccctcaaagagctgagtcttgcgggtaatgccttgggagatgaaggcgcacgtctcttgtgcgaatcgttattagaaccggcgtgccagctccaaagcctttgggtgaaaagctgttctttcactgctgcttcatgccagcattttagttcgatgttgacgcgcaacacgtgtcttgtcgagctccaattgagcaataataaattaggtgattgtggcgtgcagcagctttgccaagggttatctcaaccaggttcggccctccaggttttgtggttgggcgactgtgatgtaacgcatagtggctgtgcaagcttagcttccgtgttgcttgtcaaccgttccttacgcgaactcgaccttagtaacaactgcatgggcgaagaagggattctccgtttgatggagagcctggaacaaccgggatgcgtgcttgaacagttggtcctctatgacatctactggtcggaggagatggataattctttacgtgccttagaagagcgcaaaccgtcattgcgcgtgattttc

SEQ ID NO: 216 - protein, 468 aa, synthetic construct
  REGION 1..468: note = Variant of RNase inhibitor
MHHHHHHGGSGTMSLDIQCQQLSDARWTELLPLLQQSEVVRLDDCGLTEMRCKDISSALQANPSLTELSLCTNELGDAGVHLVLQGLQSPTCKIEKLSLQNCCLTKTGCGVLPDMLRSMPTLRELYLNDNPLGDAGLQLLCSGLLDPQCHLEKLQVEYCNLTAASCESLASALRAKRHFKELAVSNNELGEAGVRVLCRGLVDSACQLEVLKLENCGLTSASCEDLCGVVASKPSLQELDLGDNKLGDQGIATLCPFLLHPSCQIRVLWLWDCDITTAGCRDLCRVLRAKESLKELSLAGNALGDEGARLLCESLLEPACQLQSLWVKSCSFTAASCQHFSSMLTRNTCLVELQLSNNKLGDCGVQQLCQGLSQPGSALQVLWLGDCDVTHSGCASLASVLLVNRSLRELDLSNNCMGEEGILRLMESLEQPGCVLEQLVLYDIYWSEEMDNSLRALEERKPSLRVIF

SEQ ID NO: 217 - DNA, 1404 bp, synthetic construct
  misc_feature 1..1404: note = Variant of RNase inhibitor
  source 1..1404: mol_type = other DNA
atgcaccatcatcatcatcatggcggtagcggcaccatgtctctggatattcagtgtcaacaattgtcagatgcgcgttggacggaactgttaccgcttctgcaacagagcgaagtggtgcgcctggatgactgcggcctcactgagatgcgctgcaaagacatcagtagtgcactgcaagccaacccatcgttgaccgaattaagcctgtgtacaaatgagctgggtgatgctggagttcatttagtcctgcagggcttgcagtctcctacctgcaagattgaaaaactgtccctccagaactgttgtctgacgaagactggttgcggtgtattaccggacatgcttcgttcaatgcccaccctgcgcgaactgtatctgaatgataacccgttgggcgatgcgggcctccagctgctttgctccgggctgttagacccgcaatgtcacctggagaaactgcaggtggaatactgcaatctcacagcagcctcgtgcgaaagcttggcgagcgctctgcgtgccaaacgccattttaaagaattagcggtttcgaacaacgaactgggtgaagcaggcgtgcgcgtactttgtcgtgggctggtggatagtgcgtgccaactggaggttctgaaactggaaaattgtggattgacctctgcctcctgcgaggatctttgtggtgtggtcgctagcaaaccaagcctccaggaattggaccttggcgataacaaattaggtgaccaaggcatcgcaacgttatgcccgtttctgcttcacccttcatgccagattcgtgttttgtggctctgggattgtgatatcaccaccgccggctgccgcgacctctgtcgtgtattacgcgcgaaggaatccctcaaagagctgagtcttgcgggtaatgccttgggagatgaaggcgcacgtctcttgtgcgaatcgttattagaaccggcgtgccagctccaaagcctttgggtgaaaagctgttctttcactgctgcttcatgccagcattttagttcgatgttgacgcgcaacacgtgtcttgtcgagctccaattgagcaataataaattaggtgattgtggcgtgcagcagctttgccaagggttatctcaaccaggtgccgccctccaggttttgtggttgggcgactgtgatgtatcgcatagtggctgtgcaagcttagcttccgtgttgcttgtcaaccgttccttacgcgaactcgaccttagtaacaactgcatgggcgaagaagggattctccgtttgatggagagcctggaacaaccgggatgcgtgcttgaacagttggtcctctatgacatctactggtcggaggagatggataattctttacgtgccttagaagagcgcaaaccgtcattgcgcgtgattttc

SEQ ID NO: 218 - protein, 468 aa, synthetic construct
  REGION 1..468: note = Variant of RNase inhibitor
MHHHHHHGGSGTMSLDIQCQQLSDARWTELLPLLQQSEVVRLDDCGLTEMRCKDISSALQANPSLTELSLCTNELGDAGVHLVLQGLQSPTCKIEKLSLQNCCLTKTGCGVLPDMLRSMPTLRELYLNDNPLGDAGLQLLCSGLLDPQCHLEKLQVEYCNLTAASCESLASALRAKRHFKELAVSNNELGEAGVRVLCRGLVDSACQLEVLKLENCGLTSASCEDLCGVVASKPSLQELDLGDNKLGDQGIATLCPFLLHPSCQIRVLWLWDCDITTAGCRDLCRVLRAKESLKELSLAGNALGDEGARLLCESLLEPACQLQSLWVKSCSFTAASCQHFSSMLTRNTCLVELQLSNNKLGDCGVQQLCQGLSQPGAALQVLWLGDCDVSHSGCASLASVLLVNRSLRELDLSNNCMGEEGILRLMESLEQPGCVLEQLVLYDIYWSEEMDNSLRALEERKPSLRVIF

SEQ ID NO: 219 - DNA, 1404 bp, synthetic construct
  misc_feature 1..1404: note = Variant of RNase inhibitor
  source 1..1404: mol_type = other DNA
atgcaccatcatcatcatcatggcggtagcggcaccatgtctctggatattcagtgtcaacaattgtcagatgcgcgttggacggaactgttaccgcttctgcaacagagcgaagtggtgcgcctggatgactgcggcctcactgagatgcgctgcaaagacatcagtagtgcactgcaagccaacccatcgttgaccgaattaagcctgtgtacaaatgagctgggtgatgctggagttcatttagtcctgcagggcttgcagtctcctacctgcaagattgaaaaactgtccctccagaactgttgtctgacgaagactggttgcggtgtattaccggacatgcttcgttcaatgcccaccctgcgcgaactgtatctgaatgataacccgttgggcgatgcgggcctccagctgctttgctccgggctgttagacccgcaatgtcacctggagaaactgcaggtggaatactgcaatctcacagcagcctcgtgcgaaagcttggcgagcgctctgcgtgccaaacgccattttaaagaattagcggtttcgaacaacgaactgggtgaagcaggcgtgcgcgtactttgtcgtgggctggtggatagtgcgtgccaactggaggttctgaaactggaaaattgtggattgacctctgcctcctgcgaggatctttgtggtgtggtcgctagcaaaccaagcctccaggaattggaccttggcgataacaaattaggtgaccaaggcatcgcaacgttatgcccgcgcctgcttcacccttcatgccagattcgtgttttgtggctctgggattgtgatatcaccaccgccggctgccgcgacctctgtcgtgtattacgcgcgaaggaatccctcaaagagctgagtcttgcgggtaatgccttgggagatgaaggcgcacgtctcttgtgcgaatcgttattagaaccggcgtgccagctccaaagcctttgggtgaaaagctgttctttcactgctgcttcatgccagcattttagttcgatgttgacgcgcaacacgtgtcttgtcgagctccaattgagcaataataaattaggtgattgtggcgtgcagcagctttgccaagggttatctcaaccaggttcggccctccaggttttgtggttgggcgactgtgatgtaacgcatagtggctgtgcaagcttagcttccgtgttgcttgtcaaccgttccttacgcgaactcgaccttagtaacaactgcatgggcgaagaagggattctccgtttgatggagagcgttgaacaaccgggatgcgtgcttgaacagttggtcctctatgacatctactggtcggaggagatggataattctttacgtgccttagaagagcgcaaaccgtcattgcgcgtgattttc

SEQ ID NO: 220 - protein, 468 aa, synthetic construct
  REGION 1..468: note = Variant of RNase inhibitor
MHHHHHHGGSGTMSLDIQCQQLSDARWTELLPLLQQSEVVRLDDCGLTEMRCKDISSALQANPSLTELSLCTNELGDAGVHLVLQGLQSPTCKIEKLSLQNCCLTKTGCGVLPDMLRSMPTLRELYLNDNPLGDAGLQLLCSGLLDPQCHLEKLQVEYCNLTAASCESLASALRAKRHFKELAVSNNELGEAGVRVLCRGLVDSACQLEVLKLENCGLTSASCEDLCGVVASKPSLQELDLGDNKLGDQGIATLCPRLLHPSCQIRVLWLWDCDITTAGCRDLCRVLRAKESLKELSLAGNALGDEGARLLCESLLEPACQLQSLWVKSCSFTAASCQHFSSMLTRNTCLVELQLSNNKLGDCGVQQLCQGLSQPGSALQVLWLGDCDVTHSGCASLASVLLVNRSLRELDLSNNCMGEEGILRLMESVEQPGCVLEQLVLYDIYWSEEMDNSLRALEERKPSLRVIF

SEQ ID NO: 221 - DNA, 1404 bp, synthetic construct
  misc_feature 1..1404: note = Variant of RNase inhibitor
  source 1..1404: mol_type = other DNA
atgcaccatcatcatcatcatggcggtagcggcaccatgtctctggatattcagtgtcaacaattgtcagatgcgcgttggacggaactgttaccgcttctgcaacagagcgaagtggtgcgcctggatgactgcggcctcactgagatgcgctgcaaagacatcagtagtgcactgcaagccaacccatcgttgaccgaattaagcctgtgtacaaatgagctgggtgatgctggagttcatttagtcctgcagggcttgcagtctcctacctgcaagattgaaaaactgtccctccagaactgttgtctgacgaagactggttgcggtgtattaccggacatgcttcgttcaatgcccaccctgcgcgaactgtatctgaatgataacccgttgggcgatgcgggcctccagctgctttgctccgggctgttagacccgcaatgtcacctggagaaactgcaggtggaatactgcaatctcacagcagcctcgtgcgaaagcttggcgagcgctctgcgtgccaaacgccattttaaagaattagcggtttcgaacaacgaactgggtgaagcaggcgtgcgcgtactttgtcgtgggctggtggatagtgcgtgccaactggaggttctgaaactggaaaattgtggattgacctctgcctcctgcgaggatctttgtggtgtggtcgctagcaaaccaagcctccaggaattggaccttggcgataacaaattaggtgaccaaggcatcgcaacgttatgcccgcgcctgcttcacccttcatgccagattcgtgttttgtggctctgggattgtgatatcaccaccgccggctgccgcgacctctgtcgtgtattacgcgcgaaggaatccctcaaagagctgagtcttgcgggtaatgccttgggagatgaaggcgcacgtctcttgtgcgaatcgttattagaaccggcgtgccagctccaaagcctttgggtgaaaagctgttctttcactgctgcttcatgccagcattttagttcgatgttgacgcgcaacacgtgtcttgtcgagctccaattgagcaataataaattaggtgattgtggcgtgcagcagctttgccaagggttatctcaaccaggtgccgccctccaggttttgtggttgggcgactgtgatgtaacgcatagtggctgtgcaagcttagcttccgtgttgcttgtcaaccgttccttacgcgaactcgaccttagtaacaactgcatgggcgaagaagggattctccgtttgatggagagcgtggaacaaccgggatgcgtgcttgaacagttggtcctctatgacatctactggtcggaggagatggataattctttacgtgccttagaagagcgcaaaccgtcattgcgcgtgattttc

SEQ ID NO: 222 - protein, 468 aa, synthetic construct
  REGION 1..468: note = Variant of RNase inhibitor
MHHHHHHGGSGTMSLDIQCQQLSDARWTELLPLLQQSEVVRLDDCGLTEMRCKDISSALQANPSLTELSLCTNELGDAGVHLVLQGLQSPTCKIEKLSLQNCCLTKTGCGVLPDMLRSMPTLRELYLNDNPLGDAGLQLLCSGLLDPQCHLEKLQVEYCNLTAASCESLASALRAKRHFKELAVSNNELGEAGVRVLCRGLVDSACQLEVLKLENCGLTSASCEDLCGVVASKPSLQELDLGDNKLGDQGIATLCPRLLHPSCQIRVLWLWDCDITTAGCRDLCRVLRAKESLKELSLAGNALGDEGARLLCESLLEPACQLQSLWVKSCSFTAASCQHFSSMLTRNTCLVELQLSNNKLGDCGVQQLCQGLSQPGAALQVLWLGDCDVTHSGCASLASVLLVNRSLRELDLSNNCMGEEGILRLMESVEQPGCVLEQLVLYDIYWSEEMDNSLRALEERKPSLRVIF

SEQ ID NO: 223 - DNA, 1404 bp, synthetic construct
  misc_feature 1..1404: note = Variant of RNase inhibitor
  source 1..1404: mol_type = other DNA
atgcaccatcatcatcatcatggcggtagcggcaccatgtctctggatattcagtgtcaacaattgtcagatgcgcgttggacggaactgttaccgcttctgcaacagagcgaagtggtgcgcctggatgactgcggcctcactgagatgcgctgcaaagacatcagtagtgcactgcaagccaacccatcgttgaccgaattaagcctgtgtacaaatgagctgggtgatgctggagttcatttagtcctgcagggcttgcagtctcctacctgcaagattgaaaaactgtccctccagaactgttgtctgacgaagactggttgcggtgtattacctgacatgcttcgttcaatgcccaccctgcgcgaactgtatctgaatgataacccgttgggcgatgcgggcctccagctgctttgctccgggctgttagacccgcaatgtcacctggagaaactgcaggtggaatactgcaatctcacagcagcctcgtgcgaaagcttggcgagcgctctgcgtgccaaacgccattttaaagaattagcggtttcgaacaacgaactgggtgaagcaggcgtgcgcgtactttgtcgtgggctggtggatagtgcgtgccaactggaggttctgaaactggaaaattgtggattgacctctgcctcctgcgaggatctttgtggtgtggtcgctagcaaaccaagcctccaggaattggaccttggcagtaacaaattaggtgaccaaggcatcgcaacgttatgcccgcgcctgcttcacccttcatgccagattcgtgtcttgtggctctgggattgtgatatcaccaccgccggctgccgcgacctctgtcgtgtattacgcgcgaaggaatccctcaaagagctgagtcttgcgggtaatgccttgggagatgaaggcgcacgtctcttgtgcgaatcgttattagaaccggcgtgccagctccagagcctttgggtgaaaagctgttctttcactgctgcttcatgccagcattttagttcgatgttgacgcgcaacacgtgtcttgtcgagctccaattgagcaataataaattaggtgatgaaggcgtgcagcagctttgccaagggttatctcaaccaggtgccgccctccaggttttgtggttgggcgactgtgatgtaggtcatagtggctgtgcaagcttagcttccgtgttgcttgtcaaccgttccttacgcgaactcgaccttagtaacaactgcatgggcgaagaagggattctccgtttgatggagagcgttgaacaaccgggatgcgtgcttgaacagttggtcctctatgacatctactggtcggaggagatggataattctttacgtgccttagaagagcgcaaaccgtcattgcgcgtgattttc

SEQ ID NO: 224 - protein, 468 aa, synthetic construct
  REGION 1..468: note = Variant of RNase inhibitor
MHHHHHHGGSGTMSLDIQCQQLSDARWTELLPLLQQSEVVRLDDCGLTEMRCKDISSALQANPSLTELSLCTNELGDAGVHLVLQGLQSPTCKIEKLSLQNCCLTKTGCGVLPDMLRSMPTLRELYLNDNPLGDAGLQLLCSGLLDPQCHLEKLQVEYCNLTAASCESLASALRAKRHFKELAVSNNELGEAGVRVLCRGLVDSACQLEVLKLENCGLTSASCEDLCGVVASKPSLQELDLGSNKLGDQGIATLCPRLLHPSCQIRVLWLWDCDITTAGCRDLCRVLRAKESLKELSLAGNALGDEGARLLCESLLEPACQLQSLWVKSCSFTAASCQHFSSMLTRNTCLVELQLSNNKLGDEGVQQLCQGLSQPGAALQVLWLGDCDVGHSGCASLASVLLVNRSLRELDLSNNCMGEEGILRLMESVEQPGCVLEQLVLYDIYWSEEMDNSLRALEERKPSLRVIF

SEQ ID NO: 225 - DNA, 1404 bp, synthetic construct
  misc_feature 1..1404: note = Variant of RNase inhibitor
  source 1..1404: mol_type = other DNA
atgcaccatcatcatcatcatggcggtagcggcaccatgtctctggatattcagtgtcaacaattgtcagatgcgcgttggacggaactgttaccgcttctgcaacagagcgaagtggtgcgcctggatgactgcggcctcactgagatgcgctgcaaagacatcagtagtgcactgcaagccaacccatcgttgaccgaattaagcctgtgtacaaatgagctgggtgatgctggagttcatttagtcctgcagggcttgcagtctcctacctgcaagattgaaaaactgtccctccagaactgttgtctgacgaagactggttgcggtgtattaggcgacatgcttcgttcaatgcccaccctgcgcgaactgtatctgaatgataacccgttgggcgatgcgggcctccagctgctttgctccgggctgttagacccgcaatgtcacctggagaaactgcaggtggaatactgcaatctcacagcagcctcgtgcgaaagcttggcgagcgctctgcgtgccaaacgccattttaaagaattagcggtttcgaacaacgaactgggtgaagcaggcgtgcgcgtactttgtcgtgggctggtggatagtgcgtgccaactggaggttctgaaactggaaaattgtggattgacctctgcctcctgcgaggatctttgtggtgtggtcgctagcaaaccaagcctccaggaattggaccttggcgataacaaattaggtgaccaaggcatcgcaacgttatgcccgtttctgcttcacccttcatgccagattcgtgttttgtggctctgggactgtgatatcaccaccgccggctgccgcgacctctgtcgtgtattacgcgcgaaggaatccctcaaagagctgagtcttgcgggtaatgccttgggagatgaaggcgcacgtctcttgtgcgaatcgttattagaaccggcgtgccagctccagagcctttgggtgaaaagctgttctttcactgctgcttcatgccagcattttagttcgatgttgacgcgcaacacgtgtcttaaggagctccaattgagcaataataaattaggtgatgaaggcgtgcagcagctttgccaagggttatctcaaccaggtgccgccctccaggttttgtggttgggcgactgtgatgtagcacatagtggctgtgccagcttagcttccgtgttgcttgtcaaccgttccttacgcgaactcgaccttagtaacaactgcatgggcgaagaagggattctccgtttgatggagagcctggagcaaccgggatgcgtgcttgaacagttggtcctctatgacatctactggtcggaggagatggataattctttacgtgccttagaagagcgcaaaccgtcattgcgcgtgattttc

SEQ ID NO: 226 - protein, 468 aa, synthetic construct
  REGION 1..468: note = Variant of RNase inhibitor
MHHHHHHGGSGTMSLDIQCQQLSDARWTELLPLLQQSEVVRLDDCGLTEMRCKDISSALQANPSLTELSLCTNELGDAGVHLVLQGLQSPTCKIEKLSLQNCCLTKTGCGVLGDMLRSMPTLRELYLNDNPLGDAGLQLLCSGLLDPQCHLEKLQVEYCNLTAASCESLASALRAKRHFKELAVSNNELGEAGVRVLCRGLVDSACQLEVLKLENCGLTSASCEDLCGVVASKPSLQELDLGDNKLGDQGIATLCPFLLHPSCQIRVLWLWDCDITTAGCRDLCRVLRAKESLKELSLAGNALGDEGARLLCESLLEPACQLQSLWVKSCSFTAASCQHFSSMLTRNTCLKELQLSNNKLGDEGVQQLCQGLSQPGAALQVLWLGDCDVAHSGCASLASVLLVNRSLRELDLSNNCMGEEGILRLMESLEQPGCVLEQLVLYDIYWSEEMDNSLRALEERKPSLRVIF

SEQ ID NO: 227 - DNA, 1404 bp, synthetic construct
  misc_feature 1..1404: note = Variant of RNase inhibitor
  source 1..1404: mol_type = other DNA
atgcaccatcatcatcatcatggcggtagcggcaccatgtctctggatattcagtgtcaacaattgtcagatgcgcgttggacggaactgttaccgcttctgcaacagagcgaagtggtgcgcctggatgactgcggcctcactgagatgcgctgcaaagacatcagtagtgcactgcaagccaacccatcgttgaccgaattaagcctgtgtacaaatgagctgggtgatgctggagttcatttagtcctgcagggcttgcagtctcctacctgcaagattgaaaaactgtccctccagaactgttgtctgacgaagactggttgcggtgtattaggcgacatgcttcgttcaatgcccaccctgcgcgaactgtatctgaatgataacccgttgggcgatgcgggcctccagctgctttgctccgggctgttagacccgcaatgtcacctggagaaactgcaggtggaatactgcaatctcacagcagcctcgtgcgaaagcttggcgagcgctctgcgtgccaaacgccattttaaagaattagcggtttcgaacaacgaactgggtgaagcaggcgtgcgcgtactttgtcgtgggctggtggatagtgcgtgccaactggaggttctgaaactggaaaattgtggattgacctctgcctcctgcgaggatctttgtggtgtggtcgctagcaaaccaagcctccaggaattggaccttggcgataacaaattaggtgaccaaggcatcgcaacgttatgcccggttctgcttcacccttcatgccagattcgtgttttgtggctctgggattgtgatatcaccaccgccggctgccgcgacctctgtcgtgtattacgcgcgaaggaatccctcaaagagctgagtcttgcgggtaatgccttgggagatgaaggcgcacgtctcttgtgcgaatcgttattagaaccggcgtgccagctccagagcctttgggtgaaaagctgttctttcactgctgcttcatgccagcattttagttcgatgttgacgcgcaacacgtgtcttaaggagctccaattgagcaataataaattaggtgattgtggcgtgcagcagctttgccaagggttatctcaaccaggtgccgccctccaggttttgtggttgggcgactgtgatgtaagtcatagtggctgtgcaagcttagcttccgtgttgcttgtcaaccgttccttacgcgaactcgaccttagtaacaactgcatgggcgaagaagggattctccgtttgatggagagcgtggggcaaccgggatgcgtgcttgaacagttggtcctctatgacatctactggtcggaggagatggataattctttacgtgccttagaagagcgcaaaccgtcattgcgcgtgattttc

SEQ ID NO: 228 - protein, 468 aa, synthetic construct
  REGION 1..468: note = Variant of RNase inhibitor
MHHHHHHGGSGTMSLDIQCQQLSDARWTELLPLLQQSEVVRLDDCGLTEMRCKDISSALQANPSLTELSLCTNELGDAGVHLVLQGLQSPTCKIEKLSLQNCCLTKTGCGVLGDMLRSMPTLRELYLNDNPLGDAGLQLLCSGLLDPQCHLEKLQVEYCNLTAASCESLASALRAKRHFKELAVSNNELGEAGVRVLCRGLVDSACQLEVLKLENCGLTSASCEDLCGVVASKPSLQELDLGDNKLGDQGIATLCPVLLHPSCQIRVLWLWDCDITTAGCRDLCRVLRAKESLKELSLAGNALGDEGARLLCESLLEPACQLQSLWVKSCSFTAASCQHFSSMLTRNTCLKELQLSNNKLGDCGVQQLCQGLSQPGAALQVLWLGDCDVSHSGCASLASVLLVNRSLRELDLSNNCMGEEGILRLMESVGQPGCVLEQLVLYDIYWSEEMDNSLRALEERKPSLRVIF

SEQ ID NO: 229 - DNA, 1404 bp, synthetic construct
  misc_feature 1..1404: note = Variant of RNase inhibitor
  source 1..1404: mol_type = other DNA
atgcaccatcatcatcatcatggcggtagcggcaccatgtctctggatattcagtgtcaacaattgtcagatgcgcgttggacggaactgttaccgcttctgcaacagagcgaagtggtgcgcctggatgactgcggcctcactgagatgcgctgcaaagacatcagtagtgcactgcaagccaacccatcgttgaccgaattaagcctgtgtacaaatgagctgggtgatgctggagttcatttagtcctgcagggcttgcagtctcctacctgcaagattgaaaaactgtccctccagaactgttgtctgacgaagactggttgcggtgtattaggcgacatgcttcgttcaatgcccaccctgcgcgaactgtatctgaatgataacccgttgggcgatgcgggcctccagctgctttgctccgggctgttagacccgcaatgtcacctggagaaactgcaggtggaatactgcaatctcacagcagcctcgtgcgaaagcttggcgagcgctctgcgtgccaaacgccattttaaagaattagcggtttcgaacaacgaactgggtgaagcaggcgtgcgcgtactttgtcgtgggctggtggatagtgcgtgccaactggaggttctgaaactggaaaattgtggattgacctctgcctcctgcgaggatctttgtggtgtggtcgctagcaaaccaagcctccaggaattggaccttggcgataacaaattaggtgaccaaggcatcgcaacgttatgcccggttttgcttcacccttcatgccagattcgtgttttgtggctctggaactgtgatatcaccaccgccggctgccgcgacctctgtcgtgtattacgcgcgaaggaatccctcaaagagctgagtcttgcgggtaatgccttgggagatgaaggcgcacgtctcttgtgcgaatcgttattagaaccggcgtgccagctccagagcctttgggtgaaaagctgttctttcactgctgcttcatgccagcattttagttcgatgttgacgcgcaacacgtgtcttgtcgagctccaattgagcaataataaattaggtgattgtggcgtgcagcagctttgccaagggttatctcaaccaggtgccgccctccaggttttgtggttgggcgactgtgatgtaagtcatagtggctgtgcaagcttagcttccgtgttgcttgtcaaccgttccttacgcgaactcgaccttagtaacaactgcatgggcgaagaagggattctccgtttgatggagagcgttgaacaaccgggatgcgtgcttgaacagttggtcctctatgacatctactggtcggaggagatggataattctttacgtgccttagaagagcgcaaaccgtcattgcgcgtgattttc

SEQ ID NO: 230 - protein, 468 aa, synthetic construct
  REGION 1..468: note = Variant of RNase inhibitor
MHHHHHHGGSGTMSLDIQCQQLSDARWTELLPLLQQSEVVRLDDCGLTEMRCKDISSALQANPSLTELSLCTNELGDAGVHLVLQGLQSPTCKIEKLSLQNCCLTKTGCGVLGDMLRSMPTLRELYLNDNPLGDAGLQLLCSGLLDPQCHLEKLQVEYCNLTAASCESLASALRAKRHFKELAVSNNELGEAGVRVLCRGLVDSACQLEVLKLENCGLTSASCEDLCGVVASKPSLQELDLGDNKLGDQGIATLCPVLLHPSCQIRVLWLWNCDITTAGCRDLCRVLRAKESLKELSLAGNALGDEGARLLCESLLEPACQLQSLWVKSCSFTAASCQHFSSMLTRNTCLVELQLSNNKLGDCGVQQLCQGLSQPGAALQVLWLGDCDVSHSGCASLASVLLVNRSLRELDLSNNCMGEEGILRLMESVEQPGCVLEQLVLYDIYWSEEMDNSLRALEERKPSLRVIF

SEQ ID NO: 231 - DNA, 1404 bp, synthetic construct
  misc_feature 1..1404: note = Variant of RNase inhibitor
  source 1..1404: mol_type = other DNA
atgcaccatcatcatcatcatggcggtagcggcaccatgtctctggatattcagtgtcaacaattgtcagatgcgcgttggacggaactgttaccgcttctgcaacagagcgaagtggtgcgcctggatgactgcggcctcactgagatgcgctgcaaagacatcagtagtgcactgcaagccaacccatcgttgaccgaattaagcctgtgtacaaatgagctgggtgatgctggagttcatttagtcctgcagggcttgcagtctcctacctgcaagattgaaaaactgtccctccagaactgttgtctgacgaagactggttgcggtgtattaggcgacatgcttcgttcaatgcccaccctgcgcgaactgtatctgaatgataacccgttgggcgatgcgggcctccagctgctttgctccgggctgttagacccgcaatgtcacctggagaaactgcaggtggaatactgcaatctcacagcagcctcgtgcgaaagcttggcgagcgctctgcgtgccaaacgccattttaaagaattagcggtttcgaacaacgaactgggtgaagcaggcgtgcgcgtactttgtcgtgggctggtggatagtgcgtgccaactggaggttctgaaactggaaaattgtggattgacctctgcctcctgcgaggatctttgtggtgtggtcgctagcaaaccaagcctccaggaattggaccttggcatgaacaaattaggtgaccaaggcatcgcaacgttatgcccgcgcctgcttcacccttcatgccagattcgtgtcttgtggctctgggattgtgatatcaccaccgccggctgccgcgacctctgtcgtgtattacgcgcgaaggaatccctcaaagagctgagtcttgcgggtaatgccttgggagatgaaggcgcacgtctcttgtgcgaatcgttattagaaccggcgtgccagctccagagcctttgggtgaaaagctgttctttcactgctgcttcatgccagcattttagttcgatgttgacgcgcaacacgtgtcttaaggagctccaattgagcaataataaattaggtgattgtggcgtgcagcagctttgccaagggttatctcaaccaggtgccgccctccaggttttgtggttgggcgactgtgatgtaagtcatagtggctgtgcaagcttagcttccgtgttgcttgtcaaccgttccttacgcgaactcgaccttagtaacaactgcatgggcgaagaagggattctccgtttgatggagagcctggagcaaccgggatgcgtgcttgaacagttggtcctctatgacatctactggtcggaggagatggataattctttacgtgccttagaagagcgcaaaccgtcattgcgcgtgattttc

SEQ ID NO: 232 - protein, 468 aa, synthetic construct
  REGION 1..468: note = Variant of RNase inhibitor
MHHHHHHGGSGTMSLDIQCQQLSDARWTELLPLLQQSEVVRLDDCGLTEMRCKDISSALQANPSLTELSLCTNELGDAGVHLVLQGLQSPTCKIEKLSLQNCCLTKTGCGVLGDMLRSMPTLRELYLNDNPLGDAGLQLLCSGLLDPQCHLEKLQVEYCNLTAASCESLASALRAKRHFKELAVSNNELGEAGVRVLCRGLVDSACQLEVLKLENCGLTSASCEDLCGVVASKPSLQELDLGMNKLGDQGIATLCPRLLHPSCQIRVLWLWDCDITTAGCRDLCRVLRAKESLKELSLAGNALGDEGARLLCESLLEPACQLQSLWVKSCSFTAASCQHFSSMLTRNTCLKELQLSNNKLGDCGVQQLCQGLSQPGAALQVLWLGDCDVSHSGCASLASVLLVNRSLRELDLSNNCMGEEGILRLMESLEQPGCVLEQLVLYDIYWSEEMDNSLRALEERKPSLRVIF

SEQ ID NO: 233 - DNA, 1404 bp, synthetic construct
  misc_feature 1..1404: note = Variant of RNase inhibitor
  source 1..1404: mol_type = other DNA
atgcaccatcatcatcatcatggcggtagcggcaccatgtctctggatattcagtgtcaacaattgtcagatgcgcgttggacggaactgttaccgcttctgcaacagagcgaagtggtgcgcctggatgactgcggcctcactgagatgcgctgcaaagacatcagtagtgcactgcaagccaacccatcgttgaccgaattaagcctgtgtacaaatgagctgggtgatgctggagttcatttagtcctgcagggcttgcagtctcctacctgcaagattgaaaaactgtccctccagaactgttgtctgacgaagactggttgcggtgtattaccggacatgcttcgttcaatgcccaccctgcgcgaactgtatctgaatgataacccgttgggcgatgcgggcctccagctgctttgctccgggctgttagacccgcaatgtcacctggagaaactgcaggtggaatactgcaatctcacagcagcctcgtgcgaaagcttggcgagcgctctgcgtgccaaacgccattttaaagaattagcggtttcgaacaacgaactgggtgaagcaggcgtgcgcgtactttgtcgtgggctggtggatagtgcgtgccaactggaggttctgaaactggaaaattgtggattgacctctgcctcctgcgaggatctttgtggtgtggtcgctagcaaaccaagcctccaggaattggaccttggcgataacaaattaggtgaccaaggcatcgcaacgttatgcccggttctgcttcacccttcatgccagattcgtgttttgtggctctggaactgtgatatcaccaccgccggctgccgcgacctctgtcgtgtattacgcgcgaaggaatccctcaaagagctgagtcttgcgggtaatgccttgggagatgaaggcgcacgtctcttgtgcgaatcgttattagaaccggcgtgccagctccagagcctttgggtgaaaagctgttctttcactgctgcttcatgccagcattttagttcgatgttggcgcgcaacaagtgtcttgtcgagctccaattgagcaataataaattaggtgattgtggcgtgcagcagctttgccaagggttatctcaaccaggtgccgccctccaggttttgtggttgggcgactgtgatgtagcacatagtggctgtgcaagcttagcttccgtgttgcttgtcaaccgttccttacgcgaactcgaccttagtaacaactgcatgggcgaagaagggattctccgtttgatggagagcgttgaacaaccgggatgcgtgcttgaacagttggtcctctatgacatctactggtcggaggagatggataattctttacgtgccttagaagagcgcaaaccgtcattgcgcgtgattttc

SEQ ID NO: 234 - protein, 468 aa, synthetic construct
  REGION 1..468: note = Variant of RNase inhibitor
MHHHHHHGGSGTMSLDIQCQQLSDARWTELLPLLQQSEVVRLDDCGLTEMRCKDISSALQANPSLTELSLCTNELGDAGVHLVLQGLQSPTCKIEKLSLQNCCLTKTGCGVLPDMLRSMPTLRELYLNDNPLGDAGLQLLCSGLLDPQCHLEKLQVEYCNLTAASCESLASALRAKRHFKELAVSNNELGEAGVRVLCRGLVDSACQLEVLKLENCGLTSASCEDLCGVVASKPSLQELDLGDNKLGDQGIATLCPVLLHPSCQIRVLWLWNCDITTAGCRDLCRVLRAKESLKELSLAGNALGDEGARLLCESLLEPACQLQSLWVKSCSFTAASCQHFSSMLARNKCLVELQLSNNKLGDCGVQQLCQGLSQPGAALQVLWLGDCDVAHSGCASLASVLLVNRSLRELDLSNNCMGEEGILRLMESVEQPGCVLEQLVLYDIYWSEEMDNSLRALEERKPSLRVIF

SEQ ID NO: 235 - DNA, 1404 bp, synthetic construct
  misc_feature 1..1404: note = Variant of RNase inhibitor
  source 1..1404: mol_type = other DNA
atgcaccatcatcatcatcatggcggtagcggcaccatgtctctggatattcagtgtcaacaattgtcagatgcgcgttggacggaactgttaccgcttctgcaacagagcgaagtggtgcgcctggatgactgcggcctcactgagatgcgctgcaaagacatcagtagtgcactgcaagccaacccatcgttgaccgaattaagcctgtgtacaaatgagctgggtgatgctggagttcatttagtcctgcagggcttgcagtctcctacctgcaagattgaaaaactgtccctccagaactgttgtctgacgaagactggttgcggtgtattaccggacatgcttcgttcaatgcccaccctgcgcgaactgtatctgaatgataacccgttgggcgatgcgggcctccagctgctttgctccgggctgttagacccgcaatgtcacctggagaaactgcaggtggaatactgcaatctcacagcagcctcgtgcgaaagcttggcgagcgctctgcgtgccaaacgccattttaaagaattagcggtttcgaacaacgaactgggtgaagcaggcgtgcgcgtactttgtcgtgggctggtggatagtgcgtgccaactggaggttctgaaactggaaaattgtggattgacctctgcctcctgcgaggatctttgtggtgtggtcgctagcaaaccaagcctccaggaattggaccttggcagtaacaaattaggtgaccaaggcatcgcaacgttatgcccgaccctgcttcacccttcatgccagattcgtgttttgtggctctgggattgtgatatcaccaccgccggctgccgcgacctctgtcgtgtattacgcgcgaaggaatccctcaaagagctgagtcttgcgggtaatgccttgggagatgaaggcgcacgtctcttgtgcgaatcgttattagaaccggcgtgccagctccagagcctttgggtgaaaagctgttctttcactgctgcttcatgccagcattttagttcgatgttgacgcgcaacacgtgtcttcgcgagctccaattgagcaataataaattaggtgattgtggcgtgcagcagctttgccaagggttatctcaaccaggtgccgccctccaggttttgtggttgggcgactgtgatgtaagtcatagtggctgtgcaagcttagcttccgtgttgcttgtcaaccgttccttacgcgaactcgaccttagtaacaactgcatgggcgaagaagggattctccgtttgatggagagcgttgaacaaccgggatgcgtgcttgaacagttggtcctctatgacatctactggtcggaggagatggataattctttacgtgccttagaagagcgcaaaccgtcattgcgcgtgattttc

SEQ ID NO: 236 - protein, 468 aa, synthetic construct
  REGION 1..468: note = Variant of RNase inhibitor
MHHHHHHGGSGTMSLDIQCQQLSDARWTELLPLLQQSEVVRLDDCGLTEMRCKDISSALQANPSLTELSLCTNELGDAGVHLVLQGLQSPTCKIEKLSLQNCCLTKTGCGVLPDMLRSMPTLRELYLNDNPLGDAGLQLLCSGLLDPQCHLEKLQVEYCNLTAASCESLASALRAKRHFKELAVSNNELGEAGVRVLCRGLVDSACQLEVLKLENCGLTSASCEDLCGVVASKPSLQELDLGSNKLGDQGIATLCPTLLHPSCQIRVLWLWDCDITTAGCRDLCRVLRAKESLKELSLAGNALGDEGARLLCESLLEPACQLQSLWVKSCSFTAASCQHFSSMLTRNTCLRELQLSNNKLGDCGVQQLCQGLSQPGAALQVLWLGDCDVSHSGCASLASVLLVNRSLRELDLSNNCMGEEGILRLMESVEQPGCVLEQLVLYDIYWSEEMDNSLRALEERKPSLRVIF

SEQ ID NO: 237 - DNA, 1404 bp, synthetic construct
  misc_feature 1..1404: note = Variant of RNase inhibitor
  source 1..1404: mol_type = other DNA
atgcaccatcatcatcatcatggcggtagcggcaccatgtctctggatattcagtgtcaacaattgtcagatgcgcgttggacggaactgttaccgcttctgcaacagagcgaagtggtgcgcctggatgactgcggcctcactgagatgcgctgcaaagacatcagtagtgcactgcaagccaacccatcgttgaccgaattaagcctgtgtacaaatgagctgggtgatgctggagttcatttagtcctgcagggcttgcagtctcctacctgcaagattgaaaaactgtccctccagaactgttgtctgacgaagactggttgcggtgtattaggcgacatgcttcgttcaatgcccaccctgcgcgaactgtatctgaatgataacccgttgggcgatgcgggcctccagctgctttgctccgggctgttagacccgcaatgtcacctggagaaactgcaggtggaatactgcaatctcacagcagcctcgtgcgaaagcttggcgagcgctctgcgtgccaaacgccattttaaagaattagcggtttcgaacaacgaactgggtgaagcaggcgtgcgcgtactttgtcgtgggctggtggatagtgcgtgccaactggaggttctgaaactggaaaattgtggattgacctctgcctcctgcgaggatctttgtggtgtggtcgctagcaaaccaagcctccaggaattggaccttggcatgaacaaattaggtgaccaaggcatcgcaacgttatgcccgaccctgcttcacccttcatgccagattcgtgttttgtggctctggaactgtgatatcaccaccgccggctgccgcgacctctgtcgtgtattacgcgcgaaggaatccctcaaagagctgagtcttgcgggtaatgccttgggagatgaaggcgcacgtctcttgtgcgaatcgttattagaaccggcgtgccagctccagagcctttgggtgaaaagctgttctttcactgctgcttcatgccagcattttagttcgatgttgacgcgcaacacgtgtcttgtcgagctccaattgagcaataataaattaggtgattgtggcgtgcagcagctttgccaagggttatctcaaccaggtgccgccctccaggttttgtggttgggcgactgtgatgtaggtcatagtggctgtgcaagcttagcttccgtgttgcttgtcaaccgttccttacgcgaactcgaccttagtaacaactgcatgggcgaagaagggattctccgtttgatggagagcgttgaacaaccgggatgcgtgcttgaacagttggtcctctatgacatctactggtcggaggagatggataattctttacgtgccttagaagagcgcaaaccgtcattgcgcgtgattttc

SEQ ID NO: 238 - protein, 468 aa, synthetic construct
  REGION 1..468: note = Variant of RNase inhibitor
MHHHHHHGGSGTMSLDIQCQQLSDARWTELLPLLQQSEVVRLDDCGLTEMRCKDISSALQANPSLTELSLCTNELGDAGVHLVLQGLQSPTCKIEKLSLQNCCLTKTGCGVLGDMLRSMPTLRELYLNDNPLGDAGLQLLCSGLLDPQCHLEKLQVEYCNLTAASCESLASALRAKRHFKELAVSNNELGEAGVRVLCRGLVDSACQLEVLKLENCGLTSASCEDLCGVVASKPSLQELDLGMNKLGDQGIATLCPTLLHPSCQIRVLWLWNCDITTAGCRDLCRVLRAKESLKELSLAGNALGDEGARLLCESLLEPACQLQSLWVKSCSFTAASCQHFSSMLTRNTCLVELQLSNNKLGDCGVQQLCQGLSQPGAALQVLWLGDCDVGHSGCASLASVLLVNRSLRELDLSNNCMGEEGILRLMESVEQPGCVLEQLVLYDIYWSEEMDNSLRALEERKPSLRVIF

SEQ ID NO: 239 - DNA, 1404 bp, synthetic construct
  misc_feature 1..1404: note = Variant of RNase inhibitor
  source 1..1404: mol_type = other DNA
atgcaccatcatcatcatcatggcggtagcggcaccatgtctctggatattcagtgtcaacaattgtcagatgcgcgttggacggaactgttaccgcttctgcaacagagcgaagtggtgcgcctggatgactgcggcctcactgagatgcgctgcaaagacatcagtagtgcactgcaagccaacccatcgttgaccgaattaagcctgtgtacaaatgagctgggtgatgctggagttcatttagtcctgcagggcttgcagtctcctacctgcaagattgaaaaactgtccctccagaactgttgtctgacgaagactggttgcggtgtattaccggacatgcttcgttcaatgcccaccctgcgcgaactgtatctgaatgataacccgttgggcgatgcgggcctccagctgctttgctccgggctgttagacccgcaatgtcacctggagaaactgcaggtggaatactgcaatctcacagcagcctcgtgcgaaagcttggcgagcgctctgcgtgccaaacgccattttaaagaattagcggtttcgaacaacgaactgggtgaagcaggcgtgcgcgtactttgtcgtgggctggtggatagtgcgtgccaactggaggttctgaaactggaaaattgtggattgacctctgcctcctgcgaggatctttgtggtgtggtcgctagcaaaccaagcctccaggaattggaccttggcgataacaaattaggtgaccaaggcatcgcaacgttatgcccgaccctgcttcacccttcatgccagattcgtgttttgtggctctggcagtgtgatatcaccaccgccggctgccgcgacctctgtcgtgtattacgcgcgaaggaatccctcaaagagctgagtcttgcgggtaatgccttgggagatgaaggcgcacgtctcttgtgcgaatcgttattagaaccggcgtgccagctccagagcctttgggtgaaaagctgttctttcactgctgcttcatgccagcattttagttcgatgttgacgcgcaacacgtgtcttgttgagctccaattgagcaataataaattaggtgatgaaggcgtgcagcagctttgccaagggttatctcaaccaggtgccgccctccaggttttgtggttgggcgactgtgatgtaggtcatagtggctgtgcaagcttagcttccgtgttgcttgtcaaccgttccttacgcgaactcgaccttagtaacaactgcatgggcgaagaagggattctccgtttgatggagagcgtgctgcaaccgggatgcgtgcttgaacagttggtcctctatgacatctactggtcggaggagatggataattctttacgtgccttagaagagcgcaaaccgtcattgcgcgtgattttc

SEQ ID NO: 240 - protein, 468 aa, synthetic construct
  REGION 1..468: note = Variant of RNase inhibitor
MHHHHHHGGSGTMSLDIQCQQLSDARWTELLPLLQQSEVVRLDDCGLTEMRCKDISSALQANPSLTELSLCTNELGDAGVHLVLQGLQSPTCKIEKLSLQNCCLTKTGCGVLPDMLRSMPTLRELYLNDNPLGDAGLQLLCSGLLDPQCHLEKLQVEYCNLTAASCESLASALRAKRHFKELAVSNNELGEAGVRVLCRGLVDSACQLEVLKLENCGLTSASCEDLCGVVASKPSLQELDLGDNKLGDQGIATLCPTLLHPSCQIRVLWLWQCDITTAGCRDLCRVLRAKESLKELSLAGNALGDEGARLLCESLLEPACQLQSLWVKSCSFTAASCQHFSSMLTRNTCLVELQLSNNKLGDEGVQQLCQGLSQPGAALQVLWLGDCDVGHSGCASLASVLLVNRSLRELDLSNNCMGEEGILRLMESVLQPGCVLEQLVLYDIYWSEEMDNSLRALEERKPSLRVIF

SEQ ID NO: 241 - DNA, 1404 bp, synthetic construct
  misc_feature 1..1404: note = Variant of RNase inhibitor
  source 1..1404: mol_type = other DNA
atgcaccatcatcatcatcatggcggtagcggcaccatgtctctggatattcagtgtcaacaattgtcagatgcgcgttggacggaactgttaccgcttctgcaacagagcgaagtggtgcgcctggatgactgcggcctcactgagatgcgctgcaaagacatcagtagtgcactgcaagccaacccatcgttgaccgaattaagcctgtgtacaaatgagctgggtgatgctggagttcatttagtcctgcagggcttgcagtctcctacctgcaagattgaaaaactgtccctccagaactgttgtctgacgaagactggttgcggtgtattacctgacatgcttcgttcaatgcccaccctgcgcgaactgtatctgaatgataacccgttgggcgatgcgggcctccagctgctttgctccgggctgttagacccgcaatgtcacctggagaaactgcaggtggaatactgcaatctcacagcagcctcgtgcgaaagcttggcgagcgctctgcgtgccaaacgccattttaaagaattagcggtttcgaacaacgaactgggtgaagcaggcgtgcgcgtactttgtcgtgggctggtggatagtgcgtgccaactggaggttctgaaactggaaaattgtggattgacctctgcctcctgcgaggatctttgtggtgtggtcgctagcaaaccaagcctccaggaattggaccttggcgataacaaattaggtgaccaaggcatcgcaacgttatgcccggttctgcttcacccttcatgccagattcgtgttttgtggctctgggattgtgatatcaccaccgccggctgccgcgacctctgtcgtgtattacgcgcgaaggaatccctcaaagagctgagtcttgcgggtaatgccttgggagatgaaggcgcacgtctcttgtgcgaatcgttattagaaccggcgtgccagctccagagcctttgggtgaaaagctgttctttcactgctgcttcatgccagcattttagttcgatgttgacgcgcaacacgtgtcttaaggagctccaattgagcaataataaattaggtgattgtggcgtgcagcagctttgccaagggttatctcaaccaggtgccgccctccaggttttgtggttgggcgactgtgatgtaggtcatagtggctgtgcaagcttagcttccgtgttgcttgtcaaccgttccttacgcgaactcgaccttagtaacaactgcatgggcgaagaagggattctccgtttgatggagagcgttgaacaaccgggatgcgtgcttgaacagttggtcctctatgacatctactggtcggaggagatggataattctttacgtgccttagaagagcgcaaaccgtcattgcgcgtgattttc

SEQ ID NO: 242 - protein, 468 aa, synthetic construct
  REGION 1..468: note = Variant of RNase inhibitor
MHHHHHHGGSGTMSLDIQCQQLSDARWTELLPLLQQSEVVRLDDCGLTEMRCKDISSALQANPSLTELSLCTNELGDAGVHLVLQGLQSPTCKIEKLSLQNCCLTKTGCGVLPDMLRSMPTLRELYLNDNPLGDAGLQLLCSGLLDPQCHLEKLQVEYCNLTAASCESLASALRAKRHFKELAVSNNELGEAGVRVLCRGLVDSACQLEVLKLENCGLTSASCEDLCGVVASKPSLQELDLGDNKLGDQGIATLCPVLLHPSCQIRVLWLWDCDITTAGCRDLCRVLRAKESLKELSLAGNALGDEGARLLCESLLEPACQLQSLWVKSCSFTAASCQHFSSMLTRNTCLKELQLSNNKLGDCGVQQLCQGLSQPGAALQVLWLGDCDVGHSGCASLASVLLVNRSLRELDLSNNCMGEEGILRLMESVEQPGCVLEQLVLYDIYWSEEMDNSLRALEERKPSLRVIF

SEQ ID NO: 243 - DNA, 1404 bp, synthetic construct
  misc_feature 1..1404: note = Variant of RNase inhibitor
  source 1..1404: mol_type = other DNA
atgcaccatcatcatcatcatggcggtagcggcaccatgtctctggatattcagtgtcaacaattgtcagatgcgcgttggacggaactgttaccgcttctgcaacagagcgaagtggtgcgcctggatgactgcggcctcactgagatgcgctgcaaagacatcagtagtgcactgcaagccaacccatcgttgaccgaattaagcctgtgtacaaatgagctgggtgatgctggagttcatttagtcctgcagggcttgcagtctcctacctgcaagattgaaaaactgtccctccagaactgttgtctgacgaagactggttgcggtgtattaggcgacatgcttcgttcaatgcccaccctgcgcgaactgtatctgaatgataacccgttgggcgatgcgggcctccagctgctttgctccgggctgttagacccgcaatgtcacctggagaaactgcaggtggaatactgcaatctcacagcagcctcgtgcgaaagcttggcgagcgctctgcgtgccaaacgccattttaaagaattagcggtttcgaacaacgaactgggtgaagcaggcgtgcgcgtactttgtcgtgggctggtggatagtgcgtgccaactggaggttctgaaactggaaaattgtggattgacctctgcctcctgcgaggatctttgtggtgtggtcgctagcaaaccaagcctccaggaattggaccttggcagtaacaaattaggtgaccaaggcatcgcaacgttatgcccgcgcctgcttcacccttcatgccagattcgtgttttgtggctctgggattgtgatatcaccaccgccggctgccgcgacctctgtcgtgtattacgcgcgaaggaatccctcaaagagctgagtcttgcgggtaatgccttgggagatgaaggcgcacgtctcttgtgcgaatcgttattagaaccggcgtgccagctccagagcctttgggtgaaaagctgttctttcactgctgcttcatgccagcattttagttcgatgttgacgcgcaacacgtgtcttgtcgagctccaattgagcaataataaattaggtgattgtggcgtgcagcagctttgccaagggttatctcaaccaggtgccgccctccaggttttgtggttgggcgactgtgatgtaggtcatagtggctgtgcaagcttagcttccgtgttgcttgtcaaccgttccttacgcgaactcgaccttagtaacaactgcatgggcgaagaagggattctccgtttgatggagagcgtggggcaaccgggatgcgtgcttgaacagttggtcctctatgacatctactggtcggaggagatggataattctttacgtgccttagaagagcgcaaaccgtcattgcgcgtgattttc

SEQ ID NO: 244 - protein, 468 aa, synthetic construct
  REGION 1..468: note = Variant of RNase inhibitor
MHHHHHHGGSGTMSLDIQCQQLSDARWTELLPLLQQSEVVRLDDCGLTEMRCKDISSALQANPSLTELSLCTNELGDAGVHLVLQGLQSPTCKIEKLSLQNCCLTKTGCGVLGDMLRSMPTLRELYLNDNPLGDAGLQLLCSGLLDPQCHLEKLQVEYCNLTAASCESLASALRAKRHFKELAVSNNELGEAGVRVLCRGLVDSACQLEVLKLENCGLTSASCEDLCGVVASKPSLQELDLGSNKLGDQGIATLCPRLLHPSCQIRVLWLWDCDITTAGCRDLCRVLRAKESLKELSLAGNALGDEGARLLCESLLEPACQLQSLWVKSCSFTAASCQHFSSMLTRNTCLVELQLSNNKLGDCGVQQLCQGLSQPGAALQVLWLGDCDVGHSGCASLASVLLVNRSLRELDLSNNCMGEEGILRLMESVGQPGCVLEQLVLYDIYWSEEMDNSLRALEERKPSLRVIF

SEQ ID NO: 245 - DNA, 1404 bp, synthetic construct
  misc_feature 1..1404: note = Variant of RNase inhibitor
  source 1..1404: mol_type = other DNA
atgcaccatcatcatcatcatggcggtagcggcaccatgtctctggatattcagtgtcaacaattgtcagatgcgcgttggacggaactgttaccgcttctgcaacagagcgaagtggtgcgcctggatgactgcggcctcactgagatgcgctgcaaagacatcagtagtgcactgcaagccaacccatcgttgaccgaattaagcctgtgtacaaatgagctgggtgatgctggagttcatttagtcctgcagggcttgcagtctcctacctgcaagattgaaaaactgtccctccagaactgttgtctgacgaagactggttgcggtgtattaggcgacatgcttcgttcaatgcccaccctgcgcgaactgtatctgaatgataacccgttgggcgatgcgggcctccagctgctttgctccgggctgttagacccgcaatgtcacctggagaaactgcaggtggaatactgcaatctcacagcagcctcgtgcgaaagcttggcgagcgctctgcgtgccaaacgccattttaaagaattagcggtttcgaacaacgaactgggtgaagcaggcgtgcgcgtactttgtcgtgggctggtggatagtgcgtgccaactggaggttctgaaactggaaaattgtggattgacctctgcctcctgcgaggatctttgtggtgtggtcgctagcaaaccaagcctccaggaattggaccttggcgataacaaattaggtgaccaaggcatcgcaacgttatgcccggttctgcttcacccttcatgccagattcgtcatttgtggctctgggattgtgatatcaccaccgccggctgccgcgacctctgtcgtgtattacgcgcgaaggaatccctcaaagagctgagtcttgcgggtaatgccttgggagatgaaggcgcacgtctcttgtgcgaatcgttattagaaccggcgtgccagctccagagcctttgggtgaaaagctgttctttcactgctgcttcatgccagcattttagttcgatgttgacgcgcaacacgtgtcttcgcgagctccaattgagcaataataaattaggtgatgaaggcgtgcagcagctttgccaagggttatctcaaccaggtgccgccctccaggttttgtggttgggcgactgtgatgtagcacatagtggctgtgcaagcttagcttccctgttgcttgtcaaccgttccttacgcgaactcgaccttagtaacaactgcatgggcgaagaagggattctccgtttgatggagagcgtgctgcaaccgggatgcgtgcttgaacagttggtcctctatgacatctactggtcggaggagatggataattctttacgtgccttagaagagcgcaaaccgtcattgcgcgtgattttc

SEQ ID NO: 246 - protein, 468 aa, synthetic construct
  REGION 1..468: note = Variant of RNase inhibitor
MHHHHHHGGSGTMSLDIQCQQLSDARWTELLPLLQQSEVVRLDDCGLTEMRCKDISSALQANPSLTELSLCTNELGDAGVHLVLQGLQSPTCKIEKLSLQNCCLTKTGCGVLGDMLRSMPTLRELYLNDNPLGDAGLQLLCSGLLDPQCHLEKLQVEYCNLTAASCESLASALRAKRHFKELAVSNNELGEAGVRVLCRGLVDSACQLEVLKLENCGLTSASCEDLCGVVASKPSLQELDLGDNKLGDQGIATLCPVLLHPSCQIRHLWLWDCDITTAGCRDLCRVLRAKESLKELSLAGNALGDEGARLLCESLLEPACQLQSLWVKSCSFTAASCQHFSSMLTRNTCLRELQLSNNKLGDEGVQQLCQGLSQPGAALQVLWLGDCDVAHSGCASLASLLLVNRSLRELDLSNNCMGEEGILRLMESVLQPGCVLEQLVLYDIYWSEEMDNSLRALEERKPSLRVIF

SEQ ID NO: 247 - DNA, 1404 bp, synthetic construct
  misc_feature 1..1404: note = Variant of RNase inhibitor
  source 1..1404: mol_type = other DNA
atgcaccatcatcatcatcatggcggtagcggcaccatgtctctggatattcagtgtcaacaattgtcagatgcgcgttggacggaactgttaccgcttctgcaacagagcgaagtggtgcgcctggatgactgcggcctcactgagatgcgctgcaaagacatcagtagtgcactgcaagccaacccatcgttgaccgaattaagcctgtgtacaaatgagctgggtgatgctggagttcatttagtcctgcagggcttgcagtctcctacctgcaagattgaaaaactgtccctccagaactgttgtctgacgaagactggttgcggtgtattaggcgacatgcttcgttcaatgcccaccctgcgcgaactgtatctgaatgataacccgttgggcgatgcgggcctccagctgctttgctccgggctgttagacccgcaatgtcacctggagaaactgcaggtggaatactgcaatctcacagcagcctcgtgcgaaagcttggcgagcgctctgcgtgccaaacgccattttaaagaattagcggtttcgaacaacgaactgggtgaagcaggcgtgcgcgtactttgtcgtgggctggtggatagtgcgtgccaactggaggttctgaaactggaaaattgtggattgacctctgcctcctgcgaggatctttgtggtgtggtcgctagcaaaccaagcctccaggaattggaccttggcatgaacaaattaggtgaccaaggcatcgcaacgttatgcccggttctgcttcacccttcatgccagattcgtgttttgtggctctgggattgtgatatcaccaccgccggctgccgcgacctctgtcgtgtattacgcgcgaaggaatccctcaaagagctgagtcttgcgggtaatgccttgggagatgaaggcgcacgtctcttgtgcgaatcgttattagaaccggcgtgccagctccagagcctttgggtgaaaagctgttctttcactgctgcttcatgccagcattttagttcgatgttgacgcgcaacacgtgtcttcgcgagctccaattgagcaataataaattaggtgattgtggcgtgcagcagctttgccaagggttatctcaaccaggtgccgccctccaggttttgtggttgggcgactgtgatgtagcacatagtggctgtgcaagcttagcttccgtgttgcttgtcaaccgttccttacgcgaactcgaccttagtaacaactgcatgggcgaagaagggattctccgtttgatggagagcgtggggcaaccgggatgcgtgcttgaacagttggtcctctatgacatctactggtcggaggagatggataattctttacgtgccttagaagagcgcaaaccgtcattgcgcgtgattttc

SEQ ID NO: 248 - protein, 468 aa, synthetic construct
  REGION 1..468: note = Variant of RNase inhibitor
MHHHHHHGGSGTMSLDIQCQQLSDARWTELLPLLQQSEVVRLDDCGLTEMRCKDISSALQANPSLTELSLCTNELGDAGVHLVLQGLQSPTCKIEKLSLQNCCLTKTGCGVLGDMLRSMPTLRELYLNDNPLGDAGLQLLCSGLLDPQCHLEKLQVEYCNLTAASCESLASALRAKRHFKELAVSNNELGEAGVRVLCRGLVDSACQLEVLKLENCGLTSASCEDLCGVVASKPSLQELDLGMNKLGDQGIATLCPVLLHPSCQIRVLWLWDCDITTAGCRDLCRVLRAKESLKELSLAGNALGDEGARLLCESLLEPACQLQSLWVKSCSFTAASCQHFSSMLTRNTCLRELQLSNNKLGDCGVQQLCQGLSQPGAALQVLWLGDCDVAHSGCASLASVLLVNRSLRELDLSNNCMGEEGILRLMESVGQPGCVLEQLVLYDIYWSEEMDNSLRALEERKPSLRVIF

SEQ ID NO: 249 - DNA, 1404 bp, synthetic construct
  misc_feature 1..1404: note = Variant of RNase inhibitor
  source 1..1404: mol_type = other DNA
atgcaccatcatcatcatcatggcggtagcggcaccatgtctctggatattcagtgtcaacaattgtcagatgcgcgttggacggaactgttaccgcttctgcaacagagcgaagtggtgcgcctggatgactgcggcctcactgagatgcgctgcaaagacatcagtagtgcactgcaagccaacccatcgttgaccgaattaagcctgtgtacaaatgagctgggtgatgctggagttcatttagtcctgcagggcttgcagtctcctacctgcaagattgaaaaactgtccctccagaactgttgtctgacgaagactggttgcggtgtattaccggacatgcttcgttcaatgcccaccctgcgcgaactgtatctgaatgataacccgttgggcgatgcgggcctccagctgctttgctccgggctgttagacccgcaatgtcacctggagaaactgcaggtggaatactgcaatctcacagcagcctcgtgcgaaagcttggcgagcgctctgcgtgccaaacgccattttaaagaattagcggtttcgaacaacgaactgggtgaagcaggcgtgcgcgtactttgtcgtgggctggtggatagtgcgtgccaactggaggttctgaaactggaaaattgtggattgacctctgcctcctgcgaggatctttgtggtgtggtcgctagcaaaccaagcctccaggaattggaccttggcatgaacaaattaggtgaccaaggcatcgcaacgttatgcccgcgtctgcttcacccttcatgccagattcgtcgtttgtggctctgggattgtgatatcaccaccgccggctgccgcgacctctgtcgtgtattacgcgcgaaggaatccctcaaagagctgagtcttgcgggtaatgccttgggagatgaaggcgcacgtctcttgtgcgaatcgttattagaaccggcgtgccagctccagagcctttgggtgaaaagctgttctttcactgctgcttcatgccagcatttttgttcgatgttgacgcgcaacacgtgtcttgtcgagctccaattgagcaataataaattaggtgattgtggcgtgcagcagctttgccaagggttatctcaaccaggtgccgccctccaggttttgtggttgggcgactgtgatgtaggtcatagtggctgtctgagcttagcttccgtgttgcttgtcaaccgttccttacgcgaactcgaccttagtaacaactgcatgggcgaagaagggattctccgtttgatggagagcgttgaacaaccgggatgcgtgcttgaacagttggtcctctatgacatctactggtcggaggagatggataattctttacgtgccttagaagagcgcaaaccgtcattgcgcgtgattttc

SEQ ID NO: 250 - protein, 468 aa, synthetic construct
  REGION 1..468: note = Variant of RNase inhibitor
MHHHHHHGGSGTMSLDIQCQQLSDARWTELLPLLQQSEVVRLDDCGLTEMRCKDISSALQANPSLTELSLCTNELGDAGVHLVLQGLQSPTCKIEKLSLQNCCLTKTGCGVLPDMLRSMPTLRELYLNDNPLGDAGLQLLCSGLLDPQCHLEKLQVEYCNLTAASCESLASALRAKRHFKELAVSNNELGEAGVRVLCRGLVDSACQLEVLKLENCGLTSASCEDLCGVVASKPSLQELDLGMNKLGDQGIATLCPRLLHPSCQIRRLWLWDCDITTAGCRDLCRVLRAKESLKELSLAGNALGDEGARLLCESLLEPACQLQSLWVKSCSFTAASCQHFCSMLTRNTCLVELQLSNNKLGDCGVQQLCQGLSQPGAALQVLWLGDCDVGHSGCLSLASVLLVNRSLRELDLSNNCMGEEGILRLMESVEQPGCVLEQLVLYDIYWSEEMDNSLRALEERKPSLRVIF

SEQ ID NO: 251 - DNA, 1404 bp, synthetic construct
  misc_feature 1..1404: note = Variant of RNase inhibitor
  source 1..1404: mol_type = other DNA
atgcaccatcatcatcatcatggcggtagcggcaccatgtctctggatattcagtgtcaacaattgtcagatgcgcgttggacggaactgttaccgcttctgcaacagagcgaagtggtgcgcctggatgactgcggcctcactgagatgcgctgcaaagacatcagtagtgcactgcaagccaacccatcgttgaccgaattaagcctgtgtacaaatgagctgggtgatgctggagttcatttagtcctgcagggcttgcagtctcctacctgcaagattgaaaaactgtccctccagaactgttgtctgacgaagactggttgcggtgtattaggcgacatgcttcgttcaatgcccaccctgcgcgaactgtatctgaatgataacccgttgggcgatgcgggcctccagctgctttgctccgggctgttagacccgcaatgtcacctggagaaactgcaggtggaatactgcaatctcacagcagcctcgtgcgaaagcttggcgagcgctctgcgtgccaaacgccattttaaagaattagcggtttcgaacaacgaactgggtgaagcaggcgtgcgcgtactttgtcgtgggctggtggatagtgcgtgccaactggaggttctgaaactggaaaattgtggattgacctctgcctcctgcgaggatctttgtggtgtggtcgctagcaaaccaagcctccaggaattggaccttggcatgaacaaattaggtgaccaaggcatcgcaacgttatgcccgaccctgcttcacccttcatgccagattcgtgttttgtggctctgggattgtgatatcaccaccgccggctgccgcgacctctgtcgtgtattacgcgcgaaggaatccctcaaagagctgagtcttgcgggtaatgccttgggagatgaaggcgcacgtctcttgtgcgaatcgttattagaaccggcgtgccagctccagagcctttgggtgaaaagctgttctttcactgctgcttcatgccagcattttagttcgatgttggcgcgcaacaagtgtcttgtcgagctccaattgagcaataataaattaggtgattgtggcgtgcagcagctttgccaagggttatctcaaccaggtgccgccctccaggttttgtggttgggcgactgtgatgtagcacatagtggctgtgcaagcttagcttccgtgttgcttgtcaaccgttccttacgcgaactcgaccttagtaacaactgcatgggcgaagaagggattctccgtttgatggagagcgttgaacaaccgggatgcgtgcttgaacagttggtcctctatgacatctactggtcggaggagatggataattctttacgtgccttagaagagcgcaaaccgtcattgcgcgtgattttc

SEQ ID NO: 252 - protein, 468 aa, synthetic construct
  REGION 1..468: note = Variant of RNase inhibitor
MHHHHHHGGSGTMSLDIQCQQLSDARWTELLPLLQQSEVVRLDDCGLTEMRCKDISSALQANPSLTELSLCTNELGDAGVHLVLQGLQSPTCKIEKLSLQNCCLTKTGCGVLGDMLRSMPTLRELYLNDNPLGDAGLQLLCSGLLDPQCHLEKLQVEYCNLTAASCESLASALRAKRHFKELAVSNNELGEAGVRVLCRGLVDSACQLEVLKLENCGLTSASCEDLCGVVASKPSLQELDLGMNKLGDQGIATLCPTLLHPSCQIRVLWLWDCDITTAGCRDLCRVLRAKESLKELSLAGNALGDEGARLLCESLLEPACQLQSLWVKSCSFTAASCQHFSSMLARNKCLVELQLSNNKLGDCGVQQLCQGLSQPGAALQVLWLGDCDVAHSGCASLASVLLVNRSLRELDLSNNCMGEEGILRLMESVEQPGCVLEQLVLYDIYWSEEMDNSLRALEERKPSLRVIF

SEQ ID NO: 253 - DNA, 1404 bp, synthetic construct
  misc_feature 1..1404: note = Variant of RNase inhibitor
  source 1..1404: mol_type = other DNA
atgcaccatcatcatcatcatggcggtagcggcaccatgtctctggatattcagtgtcaacaattgtcagatgcgcgttggacggaactgttaccgcttctgcaacagagcgaagtggtgcgcctggatgactgcggcctcactgagatgcgctgcaaagacatcagtagtgcactgcaagccaacccatcgttgaccgaattaagcctgtgtacaaatgagctgggtgatgctggagttcatttagtcctgcagggcttgcagtctcctacctgcaagattgaaaaactgtccctccagaactgttgtctgacgaagactggttgcggtgtattaggcgacatgcttcgttcaatgcccaccctgcgcgaactgtatctgaatgataacccgttgggcgatgcgggcctccagctgctttgctccgggctgttagacccgcaatgtcacctggagaaactgcaggtggaatactgcaatctcacagcagcctcgtgcgaaagcttggcgagcgctctgcgtgccaaacgccattttaaagaattagcggtttcgaacaacgaactgggtgaagcaggcgtgcgcgtactttgtcgtgggctggtggatagtgcgtgccaactggaggttctgaaactggaaaattgtggattgacctctgcctcctgcgaggatctttgtggtgtggtcgctagcaaaccaagcctccaggaattggaccttggcagtaacaaattaggtgaccaaggcatcgcaacgttatgcccgtttctgcttcacccttcatgccagattcgtgttttgtggctctgggactgtgatatcaccaccgccggctgccgcgacctctgtcgtgtattacgcgcgaaggaatccctcaaagagctgagtcttgcgggtaatgccttgggagatgaaggcgcacgtctcttgtgcgaatcgttattagaaccggcgtgccagctccagagcctttgggtgaaaagctgttctttcactgctgcttcatgccagcattttagttcgatgttgacgcgcaacaagtgtcttgttgagctccaattgagcaataataaattaggtgattgtggcgtgcagcagctttgccaagggttatctcaaccaggtgccgccctccaggttttgtggttgggcgactgtgatgtaggtcatagtggctgtgcaagcttagcttccgtgttgcttgtcaaccgttccttacgcgaactcgaccttagtaacaactgcatgggcgaagaagggattctccgtttgatggagagcgttgaacaaccgggatgcgtgcttgaacagttggtcctctatgacatctactggtcggaggagatggataattctttacgtgccttagaagagcgcaaaccgtcattgcgcgtgattttc

SEQ ID NO: 254 - protein, 468 aa, synthetic construct
  REGION 1..468: note = Variant of RNase inhibitor
MHHHHHHGGSGTMSLDIQCQQLSDARWTELLPLLQQSEVVRLDDCGLTEMRCKDISSALQANPSLTELSLCTNELGDAGVHLVLQGLQSPTCKIEKLSLQNCCLTKTGCGVLGDMLRSMPTLRELYLNDNPLGDAGLQLLCSGLLDPQCHLEKLQVEYCNLTAASCESLASALRAKRHFKELAVSNNELGEAGVRVLCRGLVDSACQLEVLKLENCGLTSASCEDLCGVVASKPSLQELDLGSNKLGDQGIATLCPFLLHPSCQIRVLWLWDCDITTAGCRDLCRVLRAKESLKELSLAGNALGDEGARLLCESLLEPACQLQSLWVKSCSFTAASCQHFSSMLTRNKCLVELQLSNNKLGDCGVQQLCQGLSQPGAALQVLWLGDCDVGHSGCASLASVLLVNRSLRELDLSNNCMGEEGILRLMESVEQPGCVLEQLVLYDIYWSEEMDNSLRALEERKPSLRVIF

SEQ ID NO: 255 - DNA, 1404 bp, synthetic construct
  misc_feature 1..1404: note = Variant of RNase inhibitor
  source 1..1404: mol_type = other DNA
atgcaccatcatcatcatcatggcggtagcggcaccatgtctctggatattcagtgtcaacaattgtcagatgcgcgttggacggaactgttaccgcttctgcaacagagcgaagtggtgcgcctggatgactgcggcctcactgagatgcgctgcaaagacatcagtagtgcactgcaagccaacccatcgttgaccgaattaagcctgtgtacaaatgagctgggtgatgctggagttcatttagtcctgcagggcttgcagtctcctacctgcaagattgaaaaactgtccctccagaactgttgtctgacgaagactggttgcggtgtattacctgacatgcttcgttcaatgcccaccctgcgcgaactgtatctgaatgataacccgttgggcgatgcgggcctccagctgctttgctccgggctgttagacccgcaatgtcacctggagaaactgcaggtggaatactgcaatctcacagcagcctcgtgcgaaagcttggcgagcgctctgcgtgccaaacgccattttaaagaattagcggtttcgaacaacgaactgggtgaagcaggcgtgcgcgtactttgtcgtgggctggtggatagtgcgtgccaactggaggttctgaaactggaaaattgtggattgacctctgcctcctgcgaggatctttgtggtgtggtcgctagcaaaccaagcctccaggaattggaccttggcagtaacaaattaggtgaccaaggcatcgcaacgttatgcccgcgcctgcttcacccttcatgccagattcgtgttttgtggctctgggattgtgatatcaccaccgccggctgccgcgacctctgtcgtgtattacgcgcgaaggaatccctcaaagagctgagtcttgcgggtaatgccttgggagatgaaggcgcacgtctcttgtgcgaatcgttattagaaccggcgtgccagctccagagcctttgggtgaaaagctgttctttcactgctgcttcatgccagcattttagttcgatgttggcgcgcaacaagtgtcttgttgagctccaattgagcaataataaattaggtgattgcggcgtgcagcagctttgccaagggttatctcaaccaggtgccgccctccaggttttgtggttgggcgactgtgatgtaggtcatagtggctgtgcaagcttagcttccgtgttgcttgtcaaccgttccttacgcgaactcgaccttagtaacaactgcatgggcgaagaagggattctccgtttgatggagagcgttgaacaaccgggatgcgtgcttgaacagttggtcctctatgacatctactggtcggaggagatggataattctttacgtgccttagaagagcgcaaaccgtcattgcgcgtgattttc

SEQ ID NO: 256 - protein, 468 aa, synthetic construct
  REGION 1..468: note = Variant of RNase inhibitor
MHHHHHHGGSGTMSLDIQCQQLSDARWTELLPLLQQSEVVRLDDCGLTEMRCKDISSALQANPSLTELSLCTNELGDAGVHLVLQGLQSPTCKIEKLSLQNCCLTKTGCGVLPDMLRSMPTLRELYLNDNPLGDAGLQLLCSGLLDPQCHLEKLQVEYCNLTAASCESLASALRAKRHFKELAVSNNELGEAGVRVLCRGLVDSACQLEVLKLENCGLTSASCEDLCGVVASKPSLQELDLGSNKLGDQGIATLCPRLLHPSCQIRVLWLWDCDITTAGCRDLCRVLRAKESLKELSLAGNALGDEGARLLCESLLEPACQLQSLWVKSCSFTAASCQHFSSMLARNKCLVELQLSNNKLGDCGVQQLCQGLSQPGAALQVLWLGDCDVGHSGCASLASVLLVNRSLRELDLSNNCMGEEGILRLMESVEQPGCVLEQLVLYDIYWSEEMDNSLRALEERKPSLRVIF

SEQ ID NO: 257 - DNA, 1404 bp, synthetic construct
  misc_feature 1..1404: note = Variant of RNase inhibitor
  source 1..1404: mol_type = other DNA
atgcaccatcatcatcatcatggcggtagcggcaccatgtctctggatattcagtgtcaacaattgtcagatgcgcgttggacggaactgttaccgcttctgcaacagagcgaagtggtgcgcctggatgactgcggcctcactgagatgcgctgcaaagacatcagtagtgcactgcaagccaacccatcgttgaccgaattaagcctgtgtacaaatgagctgggtgatgctggagttcatttagtcctgcagggcttgcagtctcctacctgcaagattgaaaaactgtccctccagaactgttgtctgacgaagactggttgcggtgtattaggcgacatgcttcgttcaatgcccaccctgcgcgaactgtatctgaatgataacccgttgggcgatgcgggcctccagctgctttgctccgggctgttagacccgcaatgtcacctggagaaactgcaggtggaatactgcaatctcacagcagcctcgtgcgaaagcttggcgagcgctctgcgtgccaaacgccattttaaagaattagcggtttcgaacaacgaactgggtgaagcaggcgtgcgcgtactttgtcgtgggctggtggatagtgcgtgccaactggaggttctgaaactggaaaattgtggattgacctctgcctcctgcgaggatctttgtggtgtggtcgctagcaaaccaagcctccaggaattggaccttggcatgaacaaattaggtgaccaaggcatcgcaacgttatgcccggttctgcttcacccttcatgccagattcgtgttttgtggctctgggattgtgatatcaccaccgccggctgccgcgacctctgtcgtgtattacgcgcgaaggaatccctcaaagagctgagtcttgcgggtaatgccttgggagatgaaggcgcacgtctcttgtgcgaatcgttattagaaccggcgtgccagctccagagcctttgggtgaaaagctgttctttcactgctgcttcatgccagcattttagttcgatgttggcgcgcaacacgtgtcttgtcgagctccaattgagcaataataaattaggtgattgtggcgtgcagcagctttgccaagggttatctcaaccaggtgccgccctccaggttttgtggttgggcgactgtgatgtagcacatagtggctgtgcaagcttagcttccgtgttgcttgtcaaccgttccttacgcgaactcgaccttagtaacaactgcatgggcgaagaagggattctccgtttgatggagagcgtgctgcaaccgggatgcgtgcttgaacagttggtcctctatgacatctactggtcggaggagatggataattctttacgtgccttagaagagcgcaaaccgtcattgcgcgtgattttc

SEQ ID NO: 258 - protein, 468 aa, synthetic construct
  REGION 1..468: note = Variant of RNase inhibitor
MHHHHHHGGSGTMSLDIQCQQLSDARWTELLPLLQQSEVVRLDDCGLTEMRCKDISSALQANPSLTELSLCTNELGDAGVHLVLQGLQSPTCKIEKLSLQNCCLTKTGCGVLGDMLRSMPTLRELYLNDNPLGDAGLQLLCSGLLDPQCHLEKLQVEYCNLTAASCESLASALRAKRHFKELAVSNNELGEAGVRVLCRGLVDSACQLEVLKLENCGLTSASCEDLCGVVASKPSLQELDLGMNKLGDQGIATLCPVLLHPSCQIRVLWLWDCDITTAGCRDLCRVLRAKESLKELSLAGNALGDEGARLLCESLLEPACQLQSLWVKSCSFTAASCQHFSSMLARNTCLVELQLSNNKLGDCGVQQLCQGLSQPGAALQVLWLGDCDVAHSGCASLASVLLVNRSLRELDLSNNCMGEEGILRLMESVLQPGCVLEQLVLYDIYWSEEMDNSLRALEERKPSLRVIF

SEQ ID NO: 259 - DNA, 1404 bp, synthetic construct
  misc_feature 1..1404: note = Variant of RNase inhibitor
  source 1..1404: mol_type = other DNA
atgcaccatcatcatcatcatggcggtagcggcaccatgtctctggatattcagtgtcaacaattgtcagatgcgcgttggacggaactgttaccgcttctgcaacagagcgaagtggtgcgcctggatgactgcggcctcactgagatgcgctgcaaagacatcagtagtgcactgcaagccaacccatcgttgaccgaattaagcctgtgtacaaatgagctgggtgatgctggagttcatttagtcctgcagggcttgcagtctcctacctgcaagattgaaaaactgtccctccagaactgttgtctgacgaagactggttgcggtgtattacctgacatgcttcgttcaatgcccaccctgcgcgaactgtatctgaatgataacccgttgggcgatgcgggcctccagctgctttgctccgggctgttagacccgcaatgtcacctggagaaactgcaggtggaatactgcaatctcacagcagcctcgtgcgaaagcttggcgagcgctctgcgtgccaaacgccattttaaagaattagcggtttcgaacaacgaactgggtgaagcaggcgtgcgcgtactttgtcgtgggctggtggatagtgcgtgccaactggaggttctgaaactggaaaattgtggattgacctctgcctcctgcgaggatctttgtggtgtggtcgctagcaaaccaagcctccaggaattggaccttggcgataacaaattaggtgaccaaggcatcgcaacgttatgcccgaccctgcttcacccttcatgccagattcgtgttttgtggctctgggattgtgatatcaccaccgccggctgccgcgacctctgtcgtgtattacgcgcgaaggaatccctcaaagagctgagtcttgcgggtaatgccttgggagatgaaggcgcacgtctcttgtgcgaatcgttattagaaccggcgtgccagctccagagcctttgggtgaaaagctgttctttcactgctgcttcatgccagcattttagttcgatgttggcgcgcaacaagtgtcttcgcgagctccaattgagcaataataaattaggtgattgtggcgtgcagcagctttgccaagggttatctcaaccaggtgccgccctccaggttttgtggttgggcgactgtgatgtaagtcatagtggctgtgcaagcttagcttccgtgttgcttgtcaaccgttccttacgcgaactcgaccttagtaacaactgcatgggcgaagaagggattctccgtttgatggagagcctggggcaaccgggatgcgtgcttgaacagttggtcctctatgacatctactggtcggaggagatggataattctttacgtgccttagaagagcgcaaaccgtcattgcgcgtgattttc

SEQ ID NO: 260 - protein, 468 aa, synthetic construct
  REGION 1..468: note = Variant of RNase inhibitor
MHHHHHHGGSGTMSLDIQCQQLSDARWTELLPLLQQSEVVRLDDCGLTEMRCKDISSALQANPSLTELSLCTNELGDAGVHLVLQGLQSPTCKIEKLSLQNCCLTKTGCGVLPDMLRSMPTLRELYLNDNPLGDAGLQLLCSGLLDPQCHLEKLQVEYCNLTAASCESLASALRAKRHFKELAVSNNELGEAGVRVLCRGLVDSACQLEVLKLENCGLTSASCEDLCGVVASKPSLQELDLGDNKLGDQGIATLCPTLLHPSCQIRVLWLWDCDITTAGCRDLCRVLRAKESLKELSLAGNALGDEGARLLCESLLEPACQLQSLWVKSCSFTAASCQHFSSMLARNKCLRELQLSNNKLGDCGVQQLCQGLSQPGAALQVLWLGDCDVSHSGCASLASVLLVNRSLRELDLSNNCMGEEGILRLMESLGQPGCVLEQLVLYDIYWSEEMDNSLRALEERKPSLRVIF

SEQ ID NO: 261 - DNA, 1404 bp, synthetic construct
  misc_feature 1..1404: note = Variant of RNase inhibitor
  source 1..1404: mol_type = other DNA
atgcaccatcatcatcatcatggcggtagcggcaccatgtctctggatattcagtgtcaacaattgtcagatgcgcgttggacggaactgttaccgcttctgcaacagagcgaagtggtgcgcctggatgactgcggcctcactgagatgcgctgcaaagacatcagtagtgcactgcaagccaacccatcgttgaccgaattaagcctgtgtacaaatgagctgggtgatgctggagttcatttagtcctgcagggcttgcagtctcctacctgcaagattgaaaaactgtccctccagaactgttgtctgacgaagactggttgcggtgtattacctgacatgcttcgttcaatgcccaccctgcgcgaactgtatctgaatgataacccgttgggcgatgcgggcctccagctgctttgctccgggctgttagacccgcaatgtcacctggagaaactgcaggtggaatactgcaatctcacagcagcctcgtgcgaaagcttggcgagcgctctgcgtgccaaacgccattttaaagaattagcggtttcgaacaacgaactgggtgaagcaggcgtgcgcgtactttgtcgtgggctggtggatagtgcgtgccaactggaggttctgaaactggaaaattgtggattgacctctgcctcctgcgaggatctttgtggtgtggtcgctagcaaaccaagcctccaggaattggaccttggcgataacaaattaggtgaccaaggcatcgcaacgttatgcccgcgtctgcttcacccttcatgccagattcgtgttttgtggctctggcagtgtgatatcaccaccgccggctgccgcgacctctgtcgtgtattacgcgcgaaggaatccctcaaagagctgagtcttgcgggtaatgccttgggagatgaaggcgcacgtctcttgtgcgaatcgttattagaaccggcgtgccagctccagagcctttgggtgaaaagctgttctttcactgctgcttcatgccagcattttagttcgatgttggcgcgcaacacgtgtcttgtcgagctccaattgagcaataataaattaggtgattgcggcgtgcagcagctttgccaagggttatctcaaccaggtgccgccctccaggttttgtggttgggcgactgtgatgtaggtcatagtggctgtgcaagcttagcttccgtgttgcttgtcaaccgttccttacgcgaactcgaccttagtaacaactgcatgggcgaagaagggattctccgtttgatggagagcctgctgcaaccgggatgcgtgcttgaacagttggtcctctatgacatctactggtcggaggagatggataattctttacgtgccttagaagagcgcaaaccgtcattgcgcgtgattttc

SEQ ID NO: 262 - protein, 468 aa, synthetic construct
  REGION 1..468: note = Variant of RNase inhibitor
MHHHHHHGGSGTMSLDIQCQQLSDARWTELLPLLQQSEVVRLDDCGLTEMRCKDISSALQANPSLTELSLCTNELGDAGVHLVLQGLQSPTCKIEKLSLQNCCLTKTGCGVLPDMLRSMPTLRELYLNDNPLGDAGLQLLCSGLLDPQCHLEKLQVEYCNLTAASCESLASALRAKRHFKELAVSNNELGEAGVRVLCRGLVDSACQLEVLKLENCGLTSASCEDLCGVVASKPSLQELDLGDNKLGDQGIATLCPRLLHPSCQIRVLWLWQCDITTAGCRDLCRVLRAKESLKELSLAGNALGDEGARLLCESLLEPACQLQSLWVKSCSFTAASCQHFSSMLARNTCLVELQLSNNKLGDCGVQQLCQGLSQPGAALQVLWLGDCDVGHSGCASLASVLLVNRSLRELDLSNNCMGEEGILRLMESLLQPGCVLEQLVLYDIYWSEEMDNSLRALEERKPSLRVIF

SEQ ID NO: 263 - DNA, 1404 bp, synthetic construct
  misc_feature 1..1404: note = Variant of RNase inhibitor
  source 1..1404: mol_type = other DNA
atgcaccatcatcatcatcatggcggtagcggcaccatgtctctggatattcagtgtcaacaattgtcagatgcgcgttggacggaactgttaccgcttctgcaacagagcgaagtggtgcgcctggatgactgcggcctcactgagatgcgctgcaaagacatcagtagtgcactgcaagccaacccatcgttgaccgaattaagcctgtgtacaaatgagctgggtgatgctggagttcatttagtcctgcagggcttgcagtctcctacctgcaagattgaaaaactgtccctccagaactgttgtctgacgaagactggttgcggtgtattacctgacatgcttcgttcaatgcccaccctgcgcgaactgtatctgaatgataacccgttgggcgatgcgggcctccagctgctttgctccgggctgttagacccgcaatgtcacctggagaaactgcaggtggaatactgcaatctcacagcagcctcgtgcgaaagcttggcgagcgctctgcgtgccaaacgccattttaaagaattagcggtttcgaacaacgaactgggtgaagcaggcgtgcgcgtactttgtcgtgggctggtggatagtgcgtgccaactggaggttctgaaactggaaaattgtggattgacctctgcctcctgcgaggatctttgtggtgtggtcgctagcaaaccaagcctccaggaattggaccttggcatgaacaaattaggtgaccaaggcatcgcaacgttatgcccgcgtctgcttcacccttcatgccagattcgtcgtttgtggctctgggattgtgatatcaccaccgccggctgccgcgacctctgtcgtgtattacgcgcgaaggaatccctcaaagagctgagtcttgcgggtaatgccttgggagatgaaggcgcacgtctcttgtgcgaatcgttattagaaccggcgtgccagctccagagcctttgggtgaaaagctgttctttcactgctgcttcatgccagcattttagttcgatgttgacgcgcaacacgtgtcttaaggagctccaattgagcaataataaattaggtgattgtggcgtgcagcagctttgccaagggttatctcaaccaggtgccgccctccaggttttgtggttgggcgactgtgatgtagcacatagtggctgtgcaagcttagcttccgtgttgcttgtcaaccgttccttacgcgaactcgaccttagtaacaactgcatgggcgaagaagggattctccgtttgatggagagcgttgaacaaccgggatgcgtgcttgaacagttggtcctctatgacatctactggtcggaggagatggataattctttacgtgccttagaagagcgcaaaccgtcattgcgcgtgattttc

SEQ ID NO: 264 - protein, 468 aa, synthetic construct
  REGION 1..468: note = Variant of RNase inhibitor
MHHHHHHGGSGTMSLDIQCQQLSDARWTELLPLLQQSEVVRLDDCGLTEMRCKDISSALQANPSLTELSLCTNELGDAGVHLVLQGLQSPTCKIEKLSLQNCCLTKTGCGVLPDMLRSMPTLRELYLNDNPLGDAGLQLLCSGLLDPQCHLEKLQVEYCNLTAASCESLASALRAKRHFKELAVSNNELGEAGVRVLCRGLVDSACQLEVLKLENCGLTSASCEDLCGVVASKPSLQELDLGMNKLGDQGIATLCPRLLHPSCQIRRLWLWDCDITTAGCRDLCRVLRAKESLKELSLAGNALGDEGARLLCESLLEPACQLQSLWVKSCSFTAASCQHFSSMLTRNTCLKELQLSNNKLGDCGVQQLCQGLSQPGAALQVLWLGDCDVAHSGCASLASVLLVNRSLRELDLSNNCMGEEGILRLMESVEQPGCVLEQLVLYDIYWSEEMDNSLRALEERKPSLRVIF

SEQ ID NO: 265 - DNA, 1404 bp, synthetic construct
  misc_feature 1..1404: note = Variant of RNase inhibitor
  source 1..1404: mol_type = other DNA
atgcaccatcatcatcatcatggcggtagcggcaccatgtctctggatattcagtgtcaacaattgtcagatgcgcgttggacggaactgttaccgcttctgcaacagagcgaagtggtgcgcctggatgactgcggcctcactgagatgcgctgcaaagacatcagtagtgcactgcaagccaacccatcgttgaccgaattaagcctgtgtacaaatgagctgggtgatgctggagttcatttagtcctgcagggcttgcagtctcctacctgcaagattgaaaaactgtccctccagaactgttgtctgacgaagactggttgcggtgtattacctgacatgcttcgttcaatgcccaccctgcgcgaactgtatctgaatgataacccgttgggcgatgcgggcctccagctgctttgctccgggctgttagacccgcaatgtcacctggagaaactgcaggtggaatactgcaatctcacagcagcctcgtgcgaaagcttggcgagcgctctgcgtgccaaacgccattttaaagaattagcggtttcgaacaacgaactgggtgaagcaggcgtgcgcgtactttgtcgtgggctggtggatagtgcgtgccaactggaggttctgaaactggaaaattgtggattgacctctgcctcctgcgaggatctttgtggtgtggtcgctagcaaaccaagcctccaggaattggaccttggccgtaacaaattaggtgaccaaggcatcgcaacgttatgcccgcgcctgcttcacccttcatgccagattcgtgttttgtggctctggaactgtgatatcaccaccgccggctgccgcgacctctgtcgtgtattacgcgcgaaggaatccctcaaagagctgagtcttgcgggtaatgccttgggagatgaaggcgcacgtctcttgtgcgaatcgttattagaaccggcgtgccagctccagagcctttgggtgaaaagctgttctttcactgctgcttcatgccagcattttagttcgatgttggcgcgcaacacgtgtcttgtcgagctccaattgagcaataataaattaggtgattgtggcgtgcagcagctttgccaagggttatctcaaccaggtgccgccctccaggttttgtggttgggcgactgtgatgtaggtcatagtggctgtgcaagcttagcttccgtgttgcttgtcaaccgttccttacgcgaactcgaccttagtaacaactgcatgggcgaagaagggattctccgtttgatggagagcgttgaacaaccgggatgcgtgcttgaacagttggtcctctatgacatctactggtcggaggagatggataattctttacgtgccttagaagagcgcaaaccgtcattgcgcgtgattttc

SEQ ID NO: 266 - protein, 468 aa, synthetic construct
  REGION 1..468: note = Variant of RNase inhibitor
MHHHHHHGGSGTMSLDIQCQQLSDARWTELLPLLQQSEVVRLDDCGLTEMRCKDISSALQANPSLTELSLCTNELGDAGVHLVLQGLQSPTCKIEKLSLQNCCLTKTGCGVLPDMLRSMPTLRELYLNDNPLGDAGLQLLCSGLLDPQCHLEKLQVEYCNLTAASCESLASALRAKRHFKELAVSNNELGEAGVRVLCRGLVDSACQLEVLKLENCGLTSASCEDLCGVVASKPSLQELDLGRNKLGDQGIATLCPRLLHPSCQIRVLWLWNCDITTAGCRDLCRVLRAKESLKELSLAGNALGDEGARLLCESLLEPACQLQSLWVKSCSFTAASCQHFSSMLARNTCLVELQLSNNKLGDCGVQQLCQGLSQPGAALQVLWLGDCDVGHSGCASLASVLLVNRSLRELDLSNNCMGEEGILRLMESVEQPGCVLEQLVLYDIYWSEEMDNSLRALEERKPSLRVIF

SEQ ID NO: 267 - DNA, 1404 bp, synthetic construct
  misc_feature 1..1404: note = Variant of RNase inhibitor
  source 1..1404: mol_type = other DNA
atgcaccatcatcatcatcatggcggtagcggcaccatgtctctggatattcagtgtcaacaattgtcagatgcgcgttggacggaactgttaccgcttctgcaacagagcgaagtggtgcgcctggatgactgcggcctcactgagatgcgctgcaaagacatcagtagtgcactgcaagccaacccatcgttgaccgaattaagcctgtgtacaaatgagctgggtgatgctggagttcatttagtcctgcagggcttgcagtctcctacctgcaagattgaaaaactgtccctccagaactgttgtctgacgaagactggttgcggtgtattaggcgacatgcttcgttcaatgcccaccctgcgcgaactgtatctgaatgataacccgttgggcgatgcgggcctccagctgctttgctccgggctgttagacccgcaatgtcacctggagaaactgcaggtggaatactgcaatctcacagcagcctcgtgcgaaagcttggcgagcgctctgcgtgccaaacgccattttaaagaattagcggtttcgaacaacgaactgggtgaagcaggcgtgcgcgtactttgtcgtgggctggtggatagtgcgtgccaactggaggttctgaaactggaaaattgtggattgacctctgcctcctgcgaggatctttgtggtgtggtcgctagcaaaccaagcctccaggaattggaccttggcgataacaaattaggtgaccaaggcatcgcaacgttatgcccgaccctgcttcacccttcatgccagattcgtgttttgtggctctgggattgtgatatcaccaccgccggctgccgcgacctctgtcgtgtattacgcgcgaaggaatccctcaaagagctgagtcttgcgggtaatgccttgggagatgaaggcgcacgtctcttgtgcgaatcgttattagaaccggcgtgccagctccagagcctttgggtgaaaagctgttctttcactgctgcttcatgccagcattttagttcgatgttgacgcgcaacacgtgtcttgtcgagctccaattgagcaataataaattaggtgatgaaggcgtgcagcagctttgccaagggttatctcaaccaggtgccgccctccaggttttgtggttgggcgactgtgatgtaggtcatagtggctgtgcaagcttagcttccgtgttgcttgtcaaccgttccttacgcgaactcgaccttagtaacaactgcatgggcgaagaagggattctccgtttgatggagagcgttgaacaaccgggatgcgtgcttgaacagttggtcctctatgacatctactggtcggaggagatggataattctttacgtgccttagaagagcgcaaaccgtcattgcgcgtgattttc

SEQ ID NO: 268 - protein, 468 aa, synthetic construct
  REGION 1..468: note = Variant of RNase inhibitor
MHHHHHHGGSGTMSLDIQCQQLSDARWTELLPLLQQSEVVRLDDCGLTEMRCKDISSALQANPSLTELSLCTNELGDAGVHLVLQGLQSPTCKIEKLSLQNCCLTKTGCGVLGDMLRSMPTLRELYLNDNPLGDAGLQLLCSGLLDPQCHLEKLQVEYCNLTAASCESLASALRAKRHFKELAVSNNELGEAGVRVLCRGLVDSACQLEVLKLENCGLTSASCEDLCGVVASKPSLQELDLGDNKLGDQGIATLCPTLLHPSCQIRVLWLWDCDITTAGCRDLCRVLRAKESLKELSLAGNALGDEGARLLCESLLEPACQLQSLWVKSCSFTAASCQHFSSMLTRNTCLVELQLSNNKLGDEGVQQLCQGLSQPGAALQVLWLGDCDVGHSGCASLASVLLVNRSLRELDLSNNCMGEEGILRLMESVEQPGCVLEQLVLYDIYWSEEMDNSLRALEERKPSLRVIF

SEQ ID NO: 269 - DNA, 1404 bp, synthetic construct
  misc_feature 1..1404: note = Variant of RNase inhibitor
  source 1..1404: mol_type = other DNA
atgcaccatcatcatcatcatggcggtagcggcaccatgtctctggatattcagtgtcaacaattgtcagatgcgcgttggacggaactgttaccgcttctgcaacagagcgaagtggtgcgcctggatgactgcggcctcactgagatgcgctgcaaagacatcagtagtgcactgcaagccaacccatcgttgaccgaattaagcctgtgtacaaatgagctgggtgatgctggagttcatttagtcctgcagggcttgcagtctcctacctgcaagattgaaaaactgtccctccagaactgttgtctgacgaagactggttgcggtgtattacctgacatgcttcgttcaatgcccaccctgcgcgaactgtatctgaatgataacccgttgggcgatgcgggcctccagctgctttgctccgggctgttagacccgcaatgtcacctggagaaactgcaggtggaatactgcaatctcacagcagcctcgtgcgaaagcttggcgagcgctctgcgtgccaaacgccattttaaagaattagcggtttcgaacaacgaactgggtgaagcaggcgtgcgcgtactttgtcgtgggctggtggatagtgcgtgccaactggaggttctgaaactggaaaattgtggattgacctctgcctcctgcgaggatctttgtggtgtggtcgctagcaaaccaagcctccaggaattggaccttggcagtaacaaattaggtgaccaaggcatcgcaacgttatgcccgcgtctgcttcacccttcatgccagattcgtgttttgtggctctgggactgtgatatcaccaccgccggctgccgcgacctctgtcgtgtattacgcgcgaaggaatccctcaaagagctgagtcttgcgggtaatgccttgggagatgaaggcgcacgtctcttgtgcgaatcgttattagaaccggcgtgccagctccagagcctttgggtgaaaagctgttctttcactgctgcttcatgccagcattttagttcgatgttgacgcgcaacacgtgtcttgtcgagctccaattgagcaataataaattaggtgattgtggcgtgcagcagctttgccaagggttatctcaaccaggtgccgccctccaggttttgtggttgggcgactgtgatgtaggtcatagtggctgtgcaagcttagcttccgtgttgcttgtcaaccgttccttacgcgaactcgaccttagtaacaactgcatgggcgaagaagggattctccgtttgatggagagcctggagcaaccgggatgcgtgcttgaacagttggtcctctatgacatctactggtcggaggagatggataattctttacgtgccttagaagagcgcaaaccgtcattgcgcgtgattttc

SEQ ID NO: 270 - protein, 468 aa, synthetic construct
  REGION 1..468: note = Variant of RNase inhibitor
MHHHHHHGGSGTMSLDIQCQQLSDARWTELLPLLQQSEVVRLDDCGLTEMRCKDISSALQANPSLTELSLCTNELGDAGVHLVLQGLQSPTCKIEKLSLQNCCLTKTGCGVLPDMLRSMPTLRELYLNDNPLGDAGLQLLCSGLLDPQCHLEKLQVEYCNLTAASCESLASALRAKRHFKELAVSNNELGEAGVRVLCRGLVDSACQLEVLKLENCGLTSASCEDLCGVVASKPSLQELDLGSNKLGDQGIATLCPRLLHPSCQIRVLWLWDCDITTAGCRDLCRVLRAKESLKELSLAGNALGDEGARLLCESLLEPACQLQSLWVKSCSFTAASCQHFSSMLTRNTCLVELQLSNNKLGDCGVQQLCQGLSQPGAALQVLWLGDCDVGHSGCASLASVLLVNRSLRELDLSNNCMGEEGILRLMESLEQPGCVLEQLVLYDIYWSEEMDNSLRALEERKPSLRVIF

SEQ ID NO: 271 - DNA, 1404 bp, synthetic construct
  misc_feature 1..1404: note = Variant of RNase inhibitor
  source 1..1404: mol_type = other DNA
atgcaccatcatcatcatcatggcggtagcggcaccatgtctctggatattcagtgtcaacaattgtcagatgcgcgttggacggaactgttaccgcttctgcaacagagcgaagtggtgcgcctggatgactgcggcctcactgagatgcgctgcaaagacatcagtagtgcactgcaagccaacccatcgttgaccgaattaagcctgtgtacaaatgagctgggtgatgctggagttcatttagtcctgcagggcttgcagtctcctacctgcaagattgaaaaactgtccctccagaactgttgtctgacgaagactggttgcggtgtattaggcgacatgcttcgttcaatgcccaccctgcgcgaactgtatctgaatgataacccgttgggcgatgcgggcctccagctgctttgctccgggctgttagacccgcaatgtcacctggagaaactgcaggtggaatactgcaatctcacagcagcctcgtgcgaaagcttggcgagcgctctgcgtgccaaacgccattttaaagaattagcggtttcgaacaacgaactgggtgaagcaggcgtgcgcgtactttgtcgtgggctggtggatagtgcgtgccaactggaggttctgaaactggaaaattgtggattgacctctgcctcctgcgaggatctttgtggtgtggtcgctagcaaaccaagcctccaggaattggaccttggcatgaacaaattaggtgaccaaggcatcgcaacgttatgcccgtttctgcttcacccttcatgccagattcgtgttttgtggctctgggattgtgatatcaccaccgccggctgccgcgacctctgtcgtgtattacgcgcgaaggaatccctcaaagagctgagtcttgcgggtaatgccttgggagatgaaggcgcacgtctcttgtgcgaatcgttattagaaccggcgtgccagctccagagcctttgggtgaaaagctgttctttcactgctgcttcatgccagcattttagttcgatgttgacgcgcaacacgtgtcttaaggagctccaattgagcaataataaattaggtgattgtggcgtgcagcagctttgccaagggttatctcaaccaggtgccgccctccaggttttgtggttgggcgactgtgatgtaggtcatagtggctgtgcaagcttagcttccgtgttgcttgtcaaccgttccttacgcgaactcgaccttagtaacaactgcatgggcgaagaagggattctccgtttgatggagagcgttgaacaaccgggatgcgtgcttgaacagttggtcctctatgacatctactggtcggaggagatggataattctttacgtgccttagaagagcgcaaaccgtcattgcgcgtgattttc

SEQ ID NO: 272 - protein, 468 aa, synthetic construct
  REGION 1..468: note = Variant of RNase inhibitor
MHHHHHHGGSGTMSLDIQCQQLSDARWTELLPLLQQSEVVRLDDCGLTEMRCKDISSALQANPSLTELSLCTNELGDAGVHLVLQGLQSPTCKIEKLSLQNCCLTKTGCGVLGDMLRSMPTLRELYLNDNPLGDAGLQLLCSGLLDPQCHLEKLQVEYCNLTAASCESLASALRAKRHFKELAVSNNELGEAGVRVLCRGLVDSACQLEVLKLENCGLTSASCEDLCGVVASKPSLQELDLGMNKLGDQGIATLCPFLLHPSCQIRVLWLWDCDITTAGCRDLCRVLRAKESLKELSLAGNALGDEGARLLCESLLEPACQLQSLWVKSCSFTAASCQHFSSMLTRNTCLKELQLSNNKLGDCGVQQLCQGLSQPGAALQVLWLGDCDVGHSGCASLASVLLVNRSLRELDLSNNCMGEEGILRLMESVEQPGCVLEQLVLYDIYWSEEMDNSLRALEERKPSLRVIF

SEQ ID NO: 273 - DNA, 1404 bp, synthetic construct
  misc_feature 1..1404: note = Variant of RNase inhibitor
  source 1..1404: mol_type = other DNA
atgcaccatcatcatcatcatggcggtagcggcaccatgtctctggatattcagtgtcaacaattgtcagatgcgcgttggacggaactgttaccgcttctgcaacagagcgaagtggtgcgcctggatgactgcggcctcactgagatgcgctgcaaagacatcagtagtgcactgcaagccaacccatcgttgaccgaattaagcctgtgtacaaatgagctgggtgatgctggagttcatttagtcctgcagggcttgcagtctcctacctgcaagattgaaaaactgtccctccagaactgttgtctgacgaagactggttgcggtgtattaggcgacatgcttcgttcaatgcccaccctgcgcgaactgtatctgaatgataacccgttgggcgatgcgggcctccagctgctttgctccgggctgttagacccgcaatgtcacctggagaaactgcaggtggaatactgcaatctcacagcagcctcgtgcgaaagcttggcgagcgctctgcgtgccaaacgccattttaaagaattagcggtttcgaacaacgaactgggtgaagcaggcgtgcgcgtactttgtcgtgggctggtggatagtgcgtgccaactggaggttctgaaactggaaaattgtggattgacctctgcctcctgcgaggatctttgtggtgtggtcgctagcaaaccaagcctccaggaattggaccttggcatgaacaaattaggtgaccaaggcatcgcaacgttatgcccgcgtctgcttcacccttcatgccagattcgtgttttgtggctctggcagtgtgatatcaccaccgccggctgccgcgacctctgtcgtgtattacgcgcgaaggaatccctcaaagagctgagtcttgcgggtaatgccttgggagatgaaggcgcacgtctcttgtgcgaatcgttattagaaccggcgtgccagctccagagcctttgggtgaaaagctgttctttcactgctgcttcatgccagcattttagttcgatgttggcgcgcaacaagtgtcttgtcgagctccaattgagcaataataaattaggtgattgtggcgtgcagcagctttgccaagggttatctcaaccaggtgccgccctccaggttttgtggttgggcgactgtgatgtagcacatagtggctgtgcaagcttagcttccgtgttgcttgtcaaccgttccttacgcgaactcgaccttagtaacaactgcatgggcgaagaagggattctccgtttgatggagagcgtggggcaaccgggatgcgtgcttgaacagttggtcctctatgacatctactggtcggaggagatggataattctttacgtgccttagaagagcgcaaaccgtcattgcgcgtgattttc

SEQ ID NO: 274 - protein, 468 aa, synthetic construct
  REGION 1..468: note = Variant of RNase inhibitor
MHHHHHHGGSGTMSLDIQCQQLSDARWTELLPLLQQSEVVRLDDCGLTEMRCKDISSALQANPSLTELSLCTNELGDAGVHLVLQGLQSPTCKIEKLSLQNCCLTKTGCGVLGDMLRSMPTLRELYLNDNPLGDAGLQLLCSGLLDPQCHLEKLQVEYCNLTAASCESLASALRAKRHFKELAVSNNELGEAGVRVLCRGLVDSACQLEVLKLENCGLTSASCEDLCGVVASKPSLQELDLGMNKLGDQGIATLCPRLLHPSCQIRVLWLWQCDITTAGCRDLCRVLRAKESLKELSLAGNALGDEGARLLCESLLEPACQLQSLWVKSCSFTAASCQHFSSMLARNKCLVELQLSNNKLGDCGVQQLCQGLSQPGAALQVLWLGDCDVAHSGCASLASVLLVNRSLRELDLSNNCMGEEGILRLMESVGQPGCVLEQLVLYDIYWSEEMDNSLRALEERKPSLRVIF

SEQ ID NO: 275 - DNA, 1404 bp, synthetic construct
  misc_feature 1..1404: note = Variant of RNase inhibitor
  source 1..1404: mol_type = other DNA
atgcaccatcatcatcatcatggcggtagcggcaccatgtctctggatattcagtgtcaacaattgtcagatgcgcgttggacggaactgttaccgcttctgcaacagagcgaagtggtgcgcctggatgactgcggcctcactgagatgcgctgcaaagacatcagtagtgcactgcaagccaacccatcgttgaccgaattaagcctgtgtacaaatgagctgggtgatgctggagttcatttagtcctgcagggcttgcagtctcctacctgcaagattgaaaaactgtccctccagaactgttgtctgacgaagactggttgcggtgtattaccggacatgcttcgttcaatgcccaccctgcgcgaactgtatctgaatgataacccgttgggcgatgcgggcctccagctgctttgctccgggctgttagacccgcaatgtcacctggagaaactgcaggtggaatactgcaatctcacagcagcctcgtgcgaaagcttggcgagcgctctgcgtgccaaacgccattttaaagaattagcggtttcgaacaacgaactgggtgaagcaggcgtgcgcgtactttgtcgtgggctggtggatagtgcgtgccaactggaggttctgaaactggaaaattgtggattgacctctgcctcctgcgaggatctttgtggtgtggtcgctagcaaaccaagcctccaggaattggaccttggcatgaacaaattaggtgaccaaggcatcgcaacgttatgcccgcgcctgcttcacccttcatgccagattcgtcgtttgtggctctggcagtgtgatatcaccaccgccggctgccgcgacctctgtcgtgtattacgcgcgaaggaatccctcaaagagctgagtcttgcgggtaatgccttgggagatgaaggcgcacgtctcttgtgcgaatcgttattagaaccggcgtgccagctccagagcctttgggtgaaaagctgttctttcactgctgcttcatgccagcattttagttcgatgttgacgcgcaacaagtgtcttgtcgagctccaattgagcaataataaattaggtgattgcggcgtgcagcagctttgccaagggttatctcaaccaggtgccgccctccaggttttgtggttgggcgactgtgatgtaggtcatagtggctgtgcaagcttagcttccgtgttgcttgtcaaccgttccttacgcgaactcgaccttagtaacaactgcatgggcgaagaagggattctccgtttgatggagagcgtggagcaaccgggatgcgtgcttgaacagttggtcctctatgacatctactggtcggaggagatggataattctttacgtgccttagaagagcgcaaaccgtcattgcgcgtgattttc

SEQ ID NO: 276 - protein, 468 aa, synthetic construct
  REGION 1..468: note = Variant of RNase inhibitor
MHHHHHHGGSGTMSLDIQCQQLSDARWTELLPLLQQSEVVRLDDCGLTEMRCKDISSALQANPSLTELSLCTNELGDAGVHLVLQGLQSPTCKIEKLSLQNCCLTKTGCGVLPDMLRSMPTLRELYLNDNPLGDAGLQLLCSGLLDPQCHLEKLQVEYCNLTAASCESLASALRAKRHFKELAVSNNELGEAGVRVLCRGLVDSACQLEVLKLENCGLTSASCEDLCGVVASKPSLQELDLGMNKLGDQGIATLCPRLLHPSCQIRRLWLWQCDITTAGCRDLCRVLRAKESLKELSLAGNALGDEGARLLCESLLEPACQLQSLWVKSCSFTAASCQHFSSMLTRNKCLVELQLSNNKLGDCGVQQLCQGLSQPGAALQVLWLGDCDVGHSGCASLASVLLVNRSLRELDLSNNCMGEEGILRLMESVEQPGCVLEQLVLYDIYWSEEMDNSLRALEERKPSLRVIF

SEQ ID NO: 277 - DNA, 1404 bp, synthetic construct
  misc_feature 1..1404: note = Variant of RNase inhibitor
  source 1..1404: mol_type = other DNA
atgcaccatcatcatcatcatggcggtagcggcaccatgtctctggatattcagtgtcaacaattgtcagatgcgcgttggacggaactgttaccgcttctgcaacagagcgaagtggtgcgcctggatgactgcggcctcactgagatgcgctgcaaagacatcagtagtgcactgcaagccaacccatcgttgaccgaattaagcctgtgtacaaatgagctgggtgatgctggagttcatttagtcctgcagggcttgcagtctcctacctgcaagattgaaaaactgtccctccagaactgttgtctgacgaagactggttgcggtgtattaggcgacatgcttcgttcaatgcccaccctgcgcgaactgtatctgaatgataacccgttgggcgatgcgggcctccagctgctttgctccgggctgttagacccgcaatgtcacctggagaaactgcaggtggaatactgcaatctcacagcagcctcgtgcgaaagcttggcgagcgctctgcgtgccaaacgccattttaaagaattagcggtttcgaacaacgaactgggtgaagcaggcgtgcgcgtactttgtcgtgggctggtggatagtgcgtgccaactggaggttctgaaactggaaaattgtggattgacctctgcctcctgcgaggatctttgtggtgtggtcgctagcaaaccaagcctccaggaattggaccttggcgataacaaattaggtgaccaaggcatcgcaacgttatgcccgaccctgcttcacccttcatgccagattcgtgttttgtggctctggcagtgtgatatcaccaccgccggctgccgcgacctctgtcgtgtattacgcgcgaaggaatccctcaaagagctgagtcttgcgggtaatgccttgggagatgaaggcgcacgtctcttgtgcgaatcgttattagaaccggcgtgccagctccagagcctttgggtgaaaagctgttctttcactgctgcttcatgccagcattttagttcgatgttggcgcgcaacaagtgtcttgtcgagctccaattgagcaataataaattaggtgatgaaggcgtgcagcagctttgccaagggttatctcaaccaggtgccgccctccaggttttgtggttgggcgactgtgatgtagcacatagtggctgtgccagcttagcttccgtgttgcttgtcaaccgttccttacgcgaactcgaccttagtaacaactgcatgggcgaagaagggattctccgtttgatggagagcgtgctgcaaccgggatgcgtgcttgaacagttggtcctctatgacatctactggtcggaggagatggataattctttacgtgccttagaagagcgcaaaccgtcattgcgcgtgattttc

SEQ ID NO: 278 - protein, 468 aa, synthetic construct
  REGION 1..468: note = Variant of RNase inhibitor
MHHHHHHGGSGTMSLDIQCQQLSDARWTELLPLLQQSEVVRLDDCGLTEMRCKDISSALQANPSLTELSLCTNELGDAGVHLVLQGLQSPTCKIEKLSLQNCCLTKTGCGVLGDMLRSMPTLRELYLNDNPLGDAGLQLLCSGLLDPQCHLEKLQVEYCNLTAASCESLASALRAKRHFKELAVSNNELGEAGVRVLCRGLVDSACQLEVLKLENCGLTSASCEDLCGVVASKPSLQELDLGDNKLGDQGIATLCPTLLHPSCQIRVLWLWQCDITTAGCRDLCRVLRAKESLKELSLAGNALGDEGARLLCESLLEPACQLQSLWVKSCSFTAASCQHFSSMLARNKCLVELQLSNNKLGDEGVQQLCQGLSQPGAALQVLWLGDCDVAHSGCASLASVLLVNRSLRELDLSNNCMGEEGILRLMESVLQPGCVLEQLVLYDIYWSEEMDNSLRALEERKPSLRVIF

SEQ ID NO: 279 - DNA, 1404 bp, synthetic construct
  misc_feature 1..1404: note = Variant of RNase inhibitor
  source 1..1404: mol_type = other DNA
atgcaccatcatcatcatcatggcggtagcggcaccatgtctctggatattcagtgtcaacaattgtcagatgcgcgttggacggaactgttaccgcttctgcaacagagcgaagtggtgcgcctggatgactgcggcctcactgagatgcgctgcaaagacatcagtagtgcactgcaagccaacccatcgttgaccgaattaagcctgtgtacaaatgagctgggtgatgctggagttcatttagtcctgcagggcttgcagtctcctacctgcaagattgaaaaactgtccctccagaactgttgtctgacgaagactggttgcggtgtattaggcgacatgcttcgttcaatgcccaccctgcgcgaactgtatctgaatgataacccgttgggcgatgcgggcctccagctgctttgctccgggctgttagacccgcaatgtcacctggagaaactgcaggtggaatactgcaatctcacagcagcctcgtgcgaaagcttggcgagcgctctgcgtgccaaacgccattttaaagaattagcggtttcgaacaacgaactgggtgaagcaggcgtgcgcgtactttgtcgtgggctggtggatagtgcgtgccaactggaggttctgaaactggaaaattgtggattgacctctgcctcctgcgaggatctttgtggtgtggtcgctagcaaaccaagcctccaggaattggaccttggccgtaacaaattaggtgaccaaggcatcgcaacgttatgcccgcgtctgcttcacccttcatgccagattcgtgttttgtggctctgggattgtgatatcaccaccgccggctgccgcgacctctgtcgtgtattacgcgcgaaggaatccctcaaagagctgagtcttgcgggtaatgccttgggagatgaaggcgcacgtctcttgtgcgaatcgttattagaaccggcgtgccagctccagagcctttgggtgaaaagctgttctttcactgctgcttcatgccagcattttagttcgatgttgacgcgcaacacgtgtcttgtcgagctccaattgagcaataataaattaggtgattgcggcgtgcagcagctttgccaagggttatctcaaccaggtgccgccctccaggttttgtggttgggcgactgtgatgtaggtcatagtggctgtgcaagcttagcttccgtgttgcttgtcaaccgttccttacgcgaactcgaccttagtaacaactgcatgggcgaagaagggattctccgtttgatggagagcctgctgcaaccgggatgcgtgcttgaacagttggtcctctatgacatctactggtcggaggagatggataattctttacgtgccttagaagagcgcaaaccgtcattgcgcgtgattttc

SEQ ID NO: 280 - protein, 468 aa, synthetic construct
  REGION 1..468: note = Variant of RNase inhibitor
MHHHHHHGGSGTMSLDIQCQQLSDARWTELLPLLQQSEVVRLDDCGLTEMRCKDISSALQANPSLTELSLCTNELGDAGVHLVLQGLQSPTCKIEKLSLQNCCLTKTGCGVLGDMLRSMPTLRELYLNDNPLGDAGLQLLCSGLLDPQCHLEKLQVEYCNLTAASCESLASALRAKRHFKELAVSNNELGEAGVRVLCRGLVDSACQLEVLKLENCGLTSASCEDLCGVVASKPSLQELDLGRNKLGDQGIATLCPRLLHPSCQIRVLWLWDCDITTAGCRDLCRVLRAKESLKELSLAGNALGDEGARLLCESLLEPACQLQSLWVKSCSFTAASCQHFSSMLTRNTCLVELQLSNNKLGDCGVQQLCQGLSQPGAALQVLWLGDCDVGHSGCASLASVLLVNRSLRELDLSNNCMGEEGILRLMESLLQPGCVLEQLVLYDIYWSEEMDNSLRALEERKPSLRVIF

SEQ ID NO: 281 - DNA, 1404 bp, synthetic construct
  misc_feature 1..1404: note = Variant of RNase inhibitor
  source 1..1404: mol_type = other DNA
atgcaccatcatcatcatcatggcggtagcggcaccatgtctctggatattcagtgtcaacaattgtcagatgcgcgttggacggaactgttaccgcttctgcaacagagcgaagtggtgcgcctggatgactgcggcctcactgagatgcgctgcaaagacatcagtagtgcactgcaagccaacccatcgttgaccgaattaagcctgtgtacaaatgagctgggtgatgctggagttcatttagtcctgcagggcttgcagtctcctacctgcaagattgaaaaactgtccctccagaactgttgtctgacgaagactggttgcggtgtattaggcgacatgcttcgttcaatgcccaccctgcgcgaactgtatctgaatgataacccgttgggcgatgcgggcctccagctgctttgctccgggctgttagacccgcaatgtcacctggagaaactgcaggtggaatactgcaatctcacagcagcctcgtgcgaaagcttggcgagcgctctgcgtgccaaacgccattttaaagaattagcggtttcgaacaacgaactgggtgaagcaggcgtgcgcgtactttgtcgtgggctggtggatagtgcgtgccaactggaggttctgaaactggaaaattgtggattgacctctgcctcctgcgaggatctttgtggtgtggtcgctagcaaaccaagcctccaggaattggaccttggcatgaacaaattaggtgaccaaggcatcgcaacgttatgcccgtttctgcttcacccttcatgccagattcgtgttttgtggctctggaactgtgatatcaccaccgccggctgccgcgacctctgtcgtgtattacgcgcgaaggaatccctcaaagagctgagtcttgcgggtaatgccttgggagatgaaggcgcacgtctcttgtgcgaatcgttattagaaccggcgtgccagctccagagcctttgggtgaaaagctgttctttcactgctgcttcatgccagcattttagttcgatgttgacgcgcaacacgtgtcttcgcgagctccaattgagcaataataaattaggtgatgaaggcgtgcagcagctttgccaagggttatctcaaccaggtgccgccctccaggttttgtggttgggcgactgtgatgtagctcatagtggctgtgcaagcttagcttccgtgttgcttgtcaaccgttccttacgcgaactcgaccttagtaacaactgcatgggcgaagaagggattctccgtttgatggagagcgttgaacaaccgggatgcgtgcttgaacagttggtcctctatgacatctactggtcggaggagatggataattctttacgtgccttagaagagcgcaaaccgtcattgcgcgtgattttc

SEQ ID NO: 282 - protein, 468 aa, synthetic construct
  REGION 1..468: note = Variant of RNase inhibitor
MHHHHHHGGSGTMSLDIQCQQLSDARWTELLPLLQQSEVVRLDDCGLTEMRCKDISSALQANPSLTELSLCTNELGDAGVHLVLQGLQSPTCKIEKLSLQNCCLTKTGCGVLGDMLRSMPTLRELYLNDNPLGDAGLQLLCSGLLDPQCHLEKLQVEYCNLTAASCESLASALRAKRHFKELAVSNNELGEAGVRVLCRGLVDSACQLEVLKLENCGLTSASCEDLCGVVASKPSLQELDLGMNKLGDQGIATLCPFLLHPSCQIRVLWLWNCDITTAGCRDLCRVLRAKESLKELSLAGNALGDEGARLLCESLLEPACQLQSLWVKSCSFTAASCQHFSSMLTRNTCLRELQLSNNKLGDEGVQQLCQGLSQPGAALQVLWLGDCDVAHSGCASLASVLLVNRSLRELDLSNNCMGEEGILRLMESVEQPGCVLEQLVLYDIYWSEEMDNSLRALEERKPSLRVIF

SEQ ID NO: 283 - DNA, 1404 bp, synthetic construct
  misc_feature 1..1404: note = Variant of RNase inhibitor
  source 1..1404: mol_type = other DNA
atgcaccatcatcatcatcatggcggtagcggcaccatgtctctggatattcagtgtcaacaattgtcagatgcgcgttggacggaactgttaccgcttctgcaacagagcgaagtggtgcgcctggatgactgcggcctcactgagatgcgctgcaaagacatcagtagtgcactgcaagccaacccatcgttgaccgaattaagcctgtgtacaaatgagctgggtgatgctggagttcatttagtcctgcagggcttgcagtctcctacctgcaagattgaaaaactgtccctccagaactgttgtctgacgaagactggttgcggtgtattacctgacatgcttcgttcaatgcccaccctgcgcgaactgtatctgaatgataacccgttgggcgatgcgggcctccagctgctttgctccgggctgttagacccgcaatgtcacctggagaaactgcaggtggaatactgcaatctcacagcagcctcgtgcgaaagcttggcgagcgctctgcgtgccaaacgccattttaaagaattagcggtttcgaacaacgaactgggtgaagcaggcgtgcgcgtactttgtcgtgggctggtggatagtgcgtgccaactggaggttctgaaactggaaaattgtggattgacctctgcctcctgcgaggatctttgtggtgtggtcgctagcaaaccaagcctccaggaattggaccttggcatgaacaaattaggtgaccaaggcatcgcaacgttatgcccgcgtctgcttcacccttcatgccagattcgtgttttgtggctctggcagtgtgatatcaccaccgccggctgccgcgacctctgtcgtgtattacgcgcgaaggaatccctcaaagagctgagtcttgcgggtaatgccttgggagatgaaggcgcacgtctcttgtgcgaatcgttattagaaccggcgtgccagctccagagcctttgggtgaaaagctgttctttcactgctgcttcatgccagcattttagttcgatgttggcgcgcaacaagtgtcttgtcgagctccaattgagcaataataaattaggtgatgaaggcgtgcagcagctttgccaagggttatctcaaccaggtgccgccctccaggttttgtggttgggcgactgtgatgtaagtcatagtggctgtctgagcttagcttccgtgttgcttgtcaaccgttccttacgcgaactcgaccttagtaacaactgcatgggcgaagaagggattctccgtttgatggagagcgttgaacaaccgggatgcgtgcttgaacagttggtcctctatgacatctactggtcggaggagatggataattctttacgtgccttagaagagcgcaaaccgtcattgcgcgtgattttc

SEQ ID NO: 284 - protein, 468 aa, synthetic construct
  REGION 1..468: note = Variant of RNase inhibitor
MHHHHHHGGSGTMSLDIQCQQLSDARWTELLPLLQQSEVVRLDDCGLTEMRCKDISSALQANPSLTELSLCTNELGDAGVHLVLQGLQSPTCKIEKLSLQNCCLTKTGCGVLPDMLRSMPTLRELYLNDNPLGDAGLQLLCSGLLDPQCHLEKLQVEYCNLTAASCESLASALRAKRHFKELAVSNNELGEAGVRVLCRGLVDSACQLEVLKLENCGLTSASCEDLCGVVASKPSLQELDLGMNKLGDQGIATLCPRLLHPSCQIRVLWLWQCDITTAGCRDLCRVLRAKESLKELSLAGNALGDEGARLLCESLLEPACQLQSLWVKSCSFTAASCQHFSSMLARNKCLVELQLSNNKLGDEGVQQLCQGLSQPGAALQVLWLGDCDVSHSGCLSLASVLLVNRSLRELDLSNNCMGEEGILRLMESVEQPGCVLEQLVLYDIYWSEEMDNSLRALEERKPSLRVIF

SEQ ID NO: 285 - DNA, 1404 bp, synthetic construct
  misc_feature 1..1404: note = Variant of RNase inhibitor
  source 1..1404: mol_type = other DNA
atgcaccatcatcatcatcatggcggtagcggcaccatgtctctggatattcagtgtcaacaattgtcagatgcgcgttggacggaactgttaccgcttctgcaacagagcgaagtggtgcgcctggatgactgcggcctcactgagatgcgctgcaaagacatcagtagtgcactgcaagccaacccatcgttgaccgaattaagcctgtgtacaaatgagctgggtgatgctggagttcatttagtcctgcagggcttgcagtctcctacctgcaagattgaaaaactgtccctccagaactgttgtctgacgaagactggttgcggtgtattaggcgacatgcttcgttcaatgcccaccctgcgcgaactgtatctgaatgataacccgttgggcgatgcgggcctccagctgctttgctccgggctgttagacccgcaatgtcacctggagaaactgcaggtggaatactgcaatctcacagcagcctcgtgcgaaagcttggcgagcgctctgcgtgccaaacgccattttaaagaattagcggtttcgaacaacgaactgggtgaagcaggcgtgcgcgtactttgtcgtgggctggtggatagtgcgtgccaactggaggttctgaaactggaaaattgtggattgacctctgcctcctgcgaggatctttgtggtgtggtcgctagcaaaccaagcctccaggaattggaccttggcatgaacaaattaggtgaccaaggcatcgcaacgttatgcccgcgcctgcttcacccttcatgccagattcgtgttttgtggctctggcagtgtgatatcaccaccgccggctgccgcgacctctgtcgtgtattacgcgcgaaggaatccctcaaagagctgagtcttgcgggtaatgccttgggagatgaaggcgcacgtctcttgtgcgaatcgttattagaaccggcgtgccagctccagagcctttgggtgaaaagctgttctttcactgctgcttcatgccagcattttagttcgatgttgacgcgcaacacgtgtcttcgcgagctccaattgagcaataataaattaggtgatgaaggcgtgcagcagctttgccaagggttatctcaaccaggtgccgccctccaggttttgtggttgggcgactgtgatgtaagtcatagtggctgtctgagcttagcttccgtgttgcttgtcaaccgttccttacgcgaactcgaccttagtaacaactgcatgggcgaagaagggattctccgtttgatggagagcgttgaacaaccgggatgcgtgcttgaacagttggtcctctatgacatctactggtcggaggagatggataattctttacgtgccttagaagagcgcaaaccgtcattgcgcgtgattttc

SEQ ID NO: 286 - protein, 468 aa, synthetic construct
  REGION 1..468: note = Variant of RNase inhibitor
MHHHHHHGGSGTMSLDIQCQQLSDARWTELLPLLQQSEVVRLDDCGLTEMRCKDISSALQANPSLTELSLCTNELGDAGVHLVLQGLQSPTCKIEKLSLQNCCLTKTGCGVLGDMLRSMPTLRELYLNDNPLGDAGLQLLCSGLLDPQCHLEKLQVEYCNLTAASCESLASALRAKRHFKELAVSNNELGEAGVRVLCRGLVDSACQLEVLKLENCGLTSASCEDLCGVVASKPSLQELDLGMNKLGDQGIATLCPRLLHPSCQIRVLWLWQCDITTAGCRDLCRVLRAKESLKELSLAGNALGDEGARLLCESLLEPACQLQSLWVKSCSFTAASCQHFSSMLTRNTCLRELQLSNNKLGDEGVQQLCQGLSQPGAALQVLWLGDCDVSHSGCLSLASVLLVNRSLRELDLSNNCMGEEGILRLMESVEQPGCVLEQLVLYDIYWSEEMDNSLRALEERKPSLRVIF

SEQ ID NO: 287 - DNA, 1404 bp, synthetic construct
  misc_feature 1..1404: note = Variant of RNase inhibitor
  source 1..1404: mol_type = other DNA
atgcaccatcatcatcatcatggcggtagcggcaccatgtctctggatattcagtgtcaacaattgtcagatgcgcgttggacggaactgttaccgcttctgcaacagagcgaagtggtgcgcctggatgactgcggcctcactgagatgcgctgcaaagacatcagtagtgcactgcaagccaacccatcgttgaccgaattaagcctgtgtacaaatgagctgggtgatgctggagttcatttagtcctgcagggcttgcagtctcctacctgcaagattgaaaaactgtccctccagaactgttgtctgacgaagactggttgcggtgtattaggcgacatgcttcgttcaatgcccaccctgcgcgaactgtatctgaatgataacccgttgggcgatgcgggcctccagctgctttgctccgggctgttagacccgcaatgtcacctggagaaactgcaggtggaatactgcaatctcacagcagcctcgtgcgaaagcttggcgagcgctctgcgtgccaaacgccattttaaagaattagcggtttcgaacaacgaactgggtgaagcaggcgtgcgcgtactttgtcgtgggctggtggatagtgcgtgccaactggaggttctgaaactggaaaattgtggattgacctctgcctcctgcgaggatctttgtggtgtggtcgctagcaaaccaagcctccaggaattggaccttggccgtaacaaattaggtgaccaaggcatcgcaacgttatgcccggttctgcttcacccttcatgccagattcgtgttttgtggctctggcagtgtgatatcaccaccgccggctgccgcgacctctgtcgtgtattacgcgcgaaggaatccctcaaagagctgagtcttgcgggtaatgccttgggagatgaaggcgcacgtctcttgtgcgaatcgttattagaaccggcgtgccagctccagagcctttgggtgaaaagctgttctttcactgctgcttcatgccagcattttagttcgatgttggcgcgcaacacgtgtcttgtcgagctccaattgagcaataataaattaggtgattgtggcgtgcagcagctttgccaagggttatctcaaccaggtgccgccctccaggttttgtggttgggcgactgtgatgtaagtcatagtggctgtgcaagcttagcttccgtgttgcttgtcaaccgttccttacgcgaactcgaccttagtaacaactgcatgggcgaagaagggattctccgtttgatggagagcgtgctgcaaccgggatgcgtgcttgaacagttggtcctctatgacatctactggtcggaggagatggataattctttacgtgccttagaagagcgcaaaccgtcattgcgcgtgattttc

SEQ ID NO: 288 - protein, 468 aa, synthetic construct
  REGION 1..468: note = Variant of RNase inhibitor
MHHHHHHGGSGTMSLDIQCQQLSDARWTELLPLLQQSEVVRLDDCGLTEMRCKDISSALQANPSLTELSLCTNELGDAGVHLVLQGLQSPTCKIEKLSLQNCCLTKTGCGVLGDMLRSMPTLRELYLNDNPLGDAGLQLLCSGLLDPQCHLEKLQVEYCNLTAASCESLASALRAKRHFKELAVSNNELGEAGVRVLCRGLVDSACQLEVLKLENCGLTSASCEDLCGVVASKPSLQELDLGRNKLGDQGIATLCPVLLHPSCQIRVLWLWQCDITTAGCRDLCRVLRAKESLKELSLAGNALGDEGARLLCESLLEPACQLQSLWVKSCSFTAASCQHFSSMLARNTCLVELQLSNNKLGDCGVQQLCQGLSQPGAALQVLWLGDCDVSHSGCASLASVLLVNRSLRELDLSNNCMGEEGILRLMESVLQPGCVLEQLVLYDIYWSEEMDNSLRALEERKPSLRVIF

SEQ ID NO: 289 - DNA, 1404 bp, synthetic construct
  misc_feature 1..1404: note = Variant of RNase inhibitor
  source 1..1404: mol_type = other DNA
atgcaccatcatcatcatcatggcggtagcggcaccatgtctctggatattcagtgtcaacaattgtcagatgcgcgttggacggaactgttaccgcttctgcaacagagcgaagtggtgcgcctggatgactgcggcctcactgagatgcgctgcaaagacatcagtagtgcactgcaagccaacccatcgttgaccgaattaagcctgtgtacaaatgagctgggtgatgctggagttcatttagtcctgcagggcttgcagtctcctacctgcaagattgaaaaactgtccctccagaactgttgtctgacgaagactggttgcggtgtattaggcgacatgcttcgttcaatgcccaccctgcgcgaactgtatctgaatgataacccgttgggcgatgcgggcctccagctgctttgctccgggctgttagacccgcaatgtcacctggagaaactgcaggtggaatactgcaatctcacagcagcctcgtgcgaaagcttggcgagcgctctgcgtgccaaacgccattttaaagaattagcggtttcgaacaacgaactgggtgaagcaggcgtgcgcgtactttgtcgtgggctggtggatagtgcgtgccaactggaggttctgaaactggaaaattgtggattgacctctgcctcctgcgaggatctttgtggtgtggtcgctagcaaaccaagcctccaggaattggaccttggcagtaacaaattaggtgaccaaggcatcgcaacgttatgcccgcgcctgcttcacccttcatgccagattcgtcgtttgtggctctggcagtgtgatatcaccaccgccggctgccgcgacctctgtcgtgtattacgcgcgaaggaatccctcaaagagctgagtcttgcgggtaatgccttgggagatgaaggcgcacgtctcttgtgcgaatcgttattagaaccggcgtgccagctccagagcctttgggtgaaaagctgttctttcactgctgcttcatgccagcattttagttcgatgttgacgcgcaacacgtgtcttgttgagctccaattgagcaataataaattaggtgatgaaggcgtgcagcagctttgccaagggttatctcaaccaggtgccgccctccaggttttgtggttgggcgactgtgatgtaagtcatagtggctgtgcaagcttagcttccgtgttgcttgtcaaccgttccttacgcgaactcgaccttagtaacaactgcatgggcgaagaagggattctccgtttgatggagagcgtggggcaaccgggatgcgtgcttgaacagttggtcctctatgacatctactggtcggaggagatggataattctttacgtgccttagaagagcgcaaaccgtcattgcgcgtgattttc

SEQ ID NO: 290 - protein, 468 aa, synthetic construct
  REGION 1..468: note = Variant of RNase inhibitor
MHHHHHHGGSGTMSLDIQCQQLSDARWTELLPLLQQSEVVRLDDCGLTEMRCKDISSALQANPSLTELSLCTNELGDAGVHLVLQGLQSPTCKIEKLSLQNCCLTKTGCGVLGDMLRSMPTLRELYLNDNPLGDAGLQLLCSGLLDPQCHLEKLQVEYCNLTAASCESLASALRAKRHFKELAVSNNELGEAGVRVLCRGLVDSACQLEVLKLENCGLTSASCEDLCGVVASKPSLQELDLGSNKLGDQGIATLCPRLLHPSCQIRRLWLWQCDITTAGCRDLCRVLRAKESLKELSLAGNALGDEGARLLCESLLEPACQLQSLWVKSCSFTAASCQHFSSMLTRNTCLVELQLSNNKLGDEGVQQLCQGLSQPGAALQVLWLGDCDVSHSGCASLASVLLVNRSLRELDLSNNCMGEEGILRLMESVGQPGCVLEQLVLYDIYWSEEMDNSLRALEERKPSLRVIF

SEQ ID NO: 291 - DNA, 1404 bp, synthetic construct
  misc_feature 1..1404: note = Variant of RNase inhibitor
  source 1..1404: mol_type = other DNA
atgcaccatcatcatcatcatggcggtagcggcaccatgtctctggatattcagtgtcaacaattgtcagatgcgcgttggacggaactgttaccgcttctgcaacagagcgaagtggtgcgcctggatgactgcggcctcactgagatgcgctgcaaagacatcagtagtgcactgcaagccaacccatcgttgaccgaattaagcctgtgtacaaatgagctgggtgatgctggagttcatttagtcctgcagggcttgcagtctcctacctgcaagattgaaaaactgtccctccagaactgttgtctgacgaagactggttgcggtgtattaggcgacatgcttcgttcaatgcccaccctgcgcgaactgtatctgaatgataacccgttgggcgatgcgggcctccagctgctttgctccgggctgttagacccgcaatgtcacctggagaaactgcaggtggaatactgcaatctcacagcagcctcgtgcgaaagcttggcgagcgctctgcgtgccaaacgccattttaaagaattagcggtttcgaacaacgaactgggtgaagcaggcgtgcgcgtactttgtcgtgggctggtggatagtgcgtgccaactggaggttctgaaactggaaaattgtggattgacctctgcctcctgcgaggatctttgtggtgtggtcgctagcaaaccaagcctccaggaattggaccttggcatgaacaaattaggtgaccaaggcatcgcaacgttatgcccgcgcctgcttcacccttcatgccagattcgtcgtttgtggctctgggattgtgatatcaccaccgccggctgccgcgacctctgtcgtgtattacgcgcgaaggaatccctcaaagagctgagtcttgcgggtaatgccttgggagatgaaggcgcacgtctcttgtgcgaatcgttattagaaccggcgtgccagctccagagcctttgggtgaaaagctgttctttcactgctgcttcatgccagcattttagttcgatgttgacgcgcaacaagtgtcttgtcgagctccaattgagcaataataaattaggtgatgaaggcgtgcagcagctttgccaagggttatctcaaccaggtgccgccctccaggttttgtggttgggcgactgtgatgtagcacatagtggctgtgccagcttagcttccgtgttgcttgtcaaccgttccttacgcgaactcgaccttagtaacaactgcatgggcgaagaagggattctccgtttgatggagagcgtgctgcaaccgggatgcgtgcttgaacagttggtcctctatgacatctactggtcggaggagatggataattctttacgtgccttagaagagcgcaaaccgtcattgcgcgtgattttc

SEQ ID NO: 292 - protein, 468 aa, synthetic construct
  REGION 1..468: note = Variant of RNase inhibitor
MHHHHHHGGSGTMSLDIQCQQLSDARWTELLPLLQQSEVVRLDDCGLTEMRCKDISSALQANPSLTELSLCTNELGDAGVHLVLQGLQSPTCKIEKLSLQNCCLTKTGCGVLGDMLRSMPTLRELYLNDNPLGDAGLQLLCSGLLDPQCHLEKLQVEYCNLTAASCESLASALRAKRHFKELAVSNNELGEAGVRVLCRGLVDSACQLEVLKLENCGLTSASCEDLCGVVASKPSLQELDLGMNKLGDQGIATLCPRLLHPSCQIRRLWLWDCDITTAGCRDLCRVLRAKESLKELSLAGNALGDEGARLLCESLLEPACQLQSLWVKSCSFTAASCQHFSSMLTRNKCLVELQLSNNKLGDEGVQQLCQGLSQPGAALQVLWLGDCDVAHSGCASLASVLLVNRSLRELDLSNNCMGEEGILRLMESVLQPGCVLEQLVLYDIYWSEEMDNSLRALEERKPSLRVIF

SEQ ID NO: 293 - DNA, 1404 bp, synthetic construct
  misc_feature 1..1404: note = Variant of RNase inhibitor
  source 1..1404: mol_type = other DNA
atgcaccatcatcatcatcatggcggtagcggcaccatgtctctggatattcagtgtcaacaattgtcagatgcgcgttggacggaactgttaccgcttctgcaacagagcgaagtggtgcgcctggatgactgcggcctcactgagatgcgctgcaaagacatcagtagtgcactgcaagccaacccatcgttgaccgaattaagcctgtgtacaaatgagctgggtgatgctggagttcatttagtcctgcagggcttgcagtctcctacctgcaagattgaaaaactgtccctccagaactgttgtctgacgaagactggttgcggtgtattaggcgacatgcttcgttcaatgcccaccctgcgcgaactgtatctgaatgataacccgttgggcgatgcgggcctccagctgctttgctccgggctgttagacccgcaatgtcacctggagaaactgcaggtggaatactgcaatctcacagcagcctcgtgcgaaagcttggcgagcgctctgcgtgccaaacgccattttaaagaattagcggtttcgaacaacgaactgggtgaagcaggcgtgcgcgtactttgtcgtgggctggtggatagtgcgtgccaactggaggttctgaaactggaaaattgtggattgacctctgcctcctgcgaggatctttgtggtgtggtcgctagcaaaccaagcctccaggaattggaccttggcagtaacaaattaggtgaccaaggcatcgcaacgttatgcccgaccctgcttcacccttcatgccagattcgtgtcttgtggctctgggactgtgatatcaccaccgccggctgccgcgacctctgtcgtgtattacgcgcgaaggaatccctcaaagagctgagtcttgcgggtaatgccttgggagatgaaggcgcacgtctcttgtgcgaatcgttattagaaccggcgtgccagctccagagcctttgggtgaaaagctgttctttcactgctgcttcatgccagcattttagttcgatgttgacgcgcaacacgtgtcttcgcgagctccaattgagcaataataaattaggtgattgtggcgtgcagcagctttgccaagggttatctcaaccaggtgccgccctccaggttttgtggttgggcgactgtgatgtaggtcatagtggctgtgcaagcttagcttccgtgttgcttgtcaaccgttccttacgcgaactcgaccttagtaacaactgcatgggcgaagaagggattctccgtttgatggagagcgtgctgcaaccgggatgcgtgcttgaacagttggtcctctatgacatctactggtcggaggagatggataattctttacgtgccttagaagagcgcaaaccgtcattgcgcgtgattttc

SEQ ID NO: 294 - protein, 468 aa, synthetic construct
  REGION 1..468: note = Variant of RNase inhibitor
MHHHHHHGGSGTMSLDIQCQQLSDARWTELLPLLQQSEVVRLDDCGLTEMRCKDISSALQANPSLTELSLCTNELGDAGVHLVLQGLQSPTCKIEKLSLQNCCLTKTGCGVLGDMLRSMPTLRELYLNDNPLGDAGLQLLCSGLLDPQCHLEKLQVEYCNLTAASCESLASALRAKRHFKELAVSNNELGEAGVRVLCRGLVDSACQLEVLKLENCGLTSASCEDLCGVVASKPSLQELDLGSNKLGDQGIATLCPTLLHPSCQIRVLWLWDCDITTAGCRDLCRVLRAKESLKELSLAGNALGDEGARLLCESLLEPACQLQSLWVKSCSFTAASCQHFSSMLTRNTCLRELQLSNNKLGDCGVQQLCQGLSQPGAALQVLWLGDCDVGHSGCASLASVLLVNRSLRELDLSNNCMGEEGILRLMESVLQPGCVLEQLVLYDIYWSEEMDNSLRALEERKPSLRVIF

SEQ ID NO: 295 - DNA, 1404 bp, synthetic construct
  misc_feature 1..1404: note = Variant of RNase inhibitor
  source 1..1404: mol_type = other DNA
atgcaccatcatcatcatcatggcggtagcggcaccatgtctctggatattcagtgtcaacaattgtcagatgcgcgttggacggaactgttaccgcttctgcaacagagcgaagtggtgcgcctggatgactgcggcctcactgagatgcgctgcaaagacatcagtagtgcactgcaagccaacccatcgttgaccgaattaagcctgtgtacaaatgagctgggtgatgctggagttcatttagtcctgcagggcttgcagtctcctacctgcaagattgaaaaactgtccctccagaactgttgtctgacgaagactggttgcggtgtattaggcgacatgcttcgttcaatgcccaccctgcgcgaactgtatctgaatgataacccgttgggcgatgcgggcctccagctgctttgctccgggctgttagacccgcaatgtcacctggagaaactgcaggtggaatactgcaatctcacagcagcctcgtgcgaaagcttggcgagcgctctgcgtgccaaacgccattttaaagaattagcggtttcgaacaacgaactgggtgaagcaggcgtgcgcgtactttgtcgtgggctggtggatagtgcgtgccaactggaggttctgaaactggaaaattgtggattgacctctgcctcctgcgaggatctttgtggtgtggtcgctagcaaaccaagcctccaggaattggaccttggcagtaacaaattaggtgaccaaggcatcgcaacgttatgcccgaccctgcttcacccttcatgccagattcgtgttttgtggctctggaactgtgatatcaccaccgccggctgccgcgacctctgtcgtgtattacgcgcgaaggaatccctcaaagagctgagtcttgcgggtaatgccttgggagatgaaggcgcacgtctcttgtgcgaatcgttattagaaccggcgtgccagctccagagcctttgggtgaaaagctgttctttcactgctgcttcatgccagcattttagttcgatgttgacgcgcaacacgtgtcttaaggagctccaattgagcaataataaattaggtgattgtggcgtgcagcagctttgccaagggttatctcaaccaggtgccgccctccaggttttgtggttgggcgactgtgatgtaagtcatagtggctgtgccagcttagcttccgtgttgcttgtcaaccgttccttacgcgaactcgaccttagtaacaactgcatgggcgaagaagggattctccgtttgatggagagcgtggagcaaccgggatgcgtgcttgaacagttggtcctctatgacatctactggtcggaggagatggataattctttacgtgccttagaagagcgcaaaccgtcattgcgcgtgattttc

SEQ ID NO: 296 - protein, 468 aa, synthetic construct
  REGION 1..468: note = Variant of RNase inhibitor
MHHHHHHGGSGTMSLDIQCQQLSDARWTELLPLLQQSEVVRLDDCGLTEMRCKDISSALQANPSLTELSLCTNELGDAGVHLVLQGLQSPTCKIEKLSLQNCCLTKTGCGVLGDMLRSMPTLRELYLNDNPLGDAGLQLLCSGLLDPQCHLEKLQVEYCNLTAASCESLASALRAKRHFKELAVSNNELGEAGVRVLCRGLVDSACQLEVLKLENCGLTSASCEDLCGVVASKPSLQELDLGSNKLGDQGIATLCPTLLHPSCQIRVLWLWNCDITTAGCRDLCRVLRAKESLKELSLAGNALGDEGARLLCESLLEPACQLQSLWVKSCSFTAASCQHFSSMLTRNTCLKELQLSNNKLGDCGVQQLCQGLSQPGAALQVLWLGDCDVSHSGCASLASVLLVNRSLRELDLSNNCMGEEGILRLMESVEQPGCVLEQLVLYDIYWSEEMDNSLRALEERKPSLRVIF

SEQ ID NO: 297 - DNA, 1404 bp, synthetic construct
  misc_feature 1..1404: note = Variant of RNase inhibitor
  source 1..1404: mol_type = other DNA
atgcaccatcatcatcatcatggcggtagcggcaccatgtctctggatattcagtgtcaacaattgtcagatgcgcgttggacggaactgttaccgcttctgcaacagagcgaagtggtgcgcctggatgactgcggcctcactgagatgcgctgcaaagacatcagtagtgcactgcaagccaacccatcgttgaccgaattaagcctgtgtacaaatgagctgggtgatgctggagttcatttagtcctgcagggcttgcagtctcctacctgcaagattgaaaaactgtccctccagaactgttgtctgacgaagactggttgcggtgtattaggcgacatgcttcgttcaatgcccaccctgcgcgaactgtatctgaatgataacccgttgggcgatgcgggcctccagctgctttgctccgggctgttagacccgcaatgtcacctggagaaactgcaggtggaatactgcaatctcacagcagcctcgtgcgaaagcttggcgagcgctctgcgtgccaaacgccattttaaagaattagcggtttcgaacaacgaactgggtgaagcaggcgtgcgcgtactttgtcgtgggctggtggatagtgcgtgccaactggaggttctgaaactggaaaattgtggattgacctctgcctcctgcgaggatctttgtggtgtggtcgctagcaaaccaagcctccaggaattggaccttggccgtaacaaattaggtgaccaaggcatcgcaacgttatgcccgcgtctgcttcacccttcatgccagattcgtcgtttgtggctctgggattgtgatatcaccaccgccggctgccgcgacctctgtcgtgtattacgcgcgaaggaatccctcaaagagctgagtcttgcgggtaatgccttgggagatgaaggcgcacgtctcttgtgcgaatcgttattagaaccggcgtgccagctccagagcctttgggtgaaaagctgttctttcactgctgcttcatgccagcattttagttcgatgttgacgcgcaacacgtgtcttgttgagctccaattgagcaataataaattaggtgattgtggcgtgcagcagctttgccaagggttatctcaaccaggtgccgccctccaggttttgtggttgggcgactgtgatgtaggtcatagtggctgtgccagcttagcttccgtgttgcttgtcaaccgttccttacgcgaactcgaccttagtaacaactgcatgggcgaagaagggattctccgtttgatggagagcgtggggcaaccgggatgcgtgcttgaacagttggtcctctatgacatctactggtcggaggagatggataattctttacgtgccttagaagagcgcaaaccgtcattgcgcgtgattttc

SEQ ID NO: 298 - protein, 468 aa, synthetic construct
  REGION 1..468: note = Variant of RNase inhibitor
MHHHHHHGGSGTMSLDIQCQQLSDARWTELLPLLQQSEVVRLDDCGLTEMRCKDISSALQANPSLTELSLCTNELGDAGVHLVLQGLQSPTCKIEKLSLQNCCLTKTGCGVLGDMLRSMPTLRELYLNDNPLGDAGLQLLCSGLLDPQCHLEKLQVEYCNLTAASCESLASALRAKRHFKELAVSNNELGEAGVRVLCRGLVDSACQLEVLKLENCGLTSASCEDLCGVVASKPSLQELDLGRNKLGDQGIATLCPRLLHPSCQIRRLWLWDCDITTAGCRDLCRVLRAKESLKELSLAGNALGDEGARLLCESLLEPACQLQSLWVKSCSFTAASCQHFSSMLTRNTCLVELQLSNNKLGDCGVQQLCQGLSQPGAALQVLWLGDCDVGHSGCASLASVLLVNRSLRELDLSNNCMGEEGILRLMESVGQPGCVLEQLVLYDIYWSEEMDNSLRALEERKPSLRVIF

SEQ ID NO: 299 - DNA, 1404 bp, synthetic construct
  misc_feature 1..1404: note = Variant of RNase inhibitor
  source 1..1404: mol_type = other DNA
atgcaccatcatcatcatcatggcggtagcggcaccatgtctctggatattcagtgtcaacaattgtcagatgcgcgttggacggaactgttaccgcttctgcaacagagcgaagtggtgcgcctggatgactgcggcctcactgagatgcgctgcaaagacatcagtagtgcactgcaagccaacccatcgttgaccgaattaagcctgtgtacaaatgagctgggtgatgctggagttcatttagtcctgcagggcttgcagtctcctacctgcaagattgaaaaactgtccctccagaactgttgtctgacgaagactggttgcggtgtattacctgacatgcttcgttcaatgcccaccctgcgcgaactgtatctgaatgataacccgttgggcgatgcgggcctccagctgctttgctccgggctgttagacccgcaatgtcacctggagaaactgcaggtggaatactgcaatctcacagcagcctcgtgcgaaagcttggcgagcgctctgcgtgccaaacgccattttaaagaattagcggtttcgaacaacgaactgggtgaagcaggcgtgcgcgtactttgtcgtgggctggtggatagtgcgtgccaactggaggttctgaaactggaaaattgtggattgacctctgcctcctgcgaggatctttgtggtgtggtcgctagcaaaccaagcctccaggaattggaccttggccgtaacaaattaggtgaccaaggcatcgcaacgttatgcccgtttctgcttcacccttcatgccagattcgtgtcttgtggctctgggattgtgatatcaccaccgccggctgccgcgacctctgtcgtgtattacgcgcgaaggaatccctcaaagagctgagtcttgcgggtaatgccttgggagatgaaggcgcacgtctcttgtgcgaatcgttattagaaccggcgtgccagctccagagcctttgggtgaaaagctgttctttcactgctgcttcatgccagcattttagttcgatgttgacgcgcaacaagtgtcttgtcgagctccaattgagcaataataaattaggtgattgtggcgtgcagcagctttgccaagggttatctcaaccaggtgccgccctccaggttttgtggttgggcgactgtgatgtagcacatagtggctgtctgagcttagcttccgtgttgcttgtcaaccgttccttacgcgaactcgaccttagtaacaactgcatgggcgaagaagggattctccgtttgatggagagcgtggggcaaccgggatgcgtgcttgaacagttggtcctctatgacatctactggtcggaggagatggataattctttacgtgccttagaagagcgcaaaccgtcattgcgcgtgattttc

SEQ ID NO: 300 - protein, 468 aa, synthetic construct
  REGION 1..468: note = Variant of RNase inhibitor
MHHHHHHGGSGTMSLDIQCQQLSDARWTELLPLLQQSEVVRLDDCGLTEMRCKDISSALQANPSLTELSLCTNELGDAGVHLVLQGLQSPTCKIEKLSLQNCCLTKTGCGVLPDMLRSMPTLRELYLNDNPLGDAGLQLLCSGLLDPQCHLEKLQVEYCNLTAASCESLASALRAKRHFKELAVSNNELGEAGVRVLCRGLVDSACQLEVLKLENCGLTSASCEDLCGVVASKPSLQELDLGRNKLGDQGIATLCPFLLHPSCQIRVLWLWDCDITTAGCRDLCRVLRAKESLKELSLAGNALGDEGARLLCESLLEPACQLQSLWVKSCSFTAASCQHFSSMLTRNKCLVELQLSNNKLGDCGVQQLCQGLSQPGAALQVLWLGDCDVAHSGCLSLASVLLVNRSLRELDLSNNCMGEEGILRLMESVGQPGCVLEQLVLYDIYWSEEMDNSLRALEERKPSLRVIF

SEQ ID NO: 301 - DNA, 1404 bp, synthetic construct
  misc_feature 1..1404: note = Variant of RNase inhibitor
  source 1..1404: mol_type = other DNA
atgcaccatcatcatcatcatggcggtagcggcaccatgtctctggatattcagtgtcaacaattgtcagatgcgcgttggacggaactgttaccgcttctgcaacagagcgaagtggtgcgcctggatgactgcggcctcactgagatgcgctgcaaagacatcagtagtgcactgcaagccaacccatcgttgaccgaattaagcctgtgtacaaatgagctgggtgatgctggagttcatttagtcctgcagggcttgcagtctcctacctgcaagattgaaaaactgtccctccagaactgttgtctgacgaagactggttgcggtgtattacctgacatgcttcgttcaatgcccaccctgcgcgaactgtatctgaatgataacccgttgggcgatgcgggcctccagctgctttgctccgggctgttagacccgcaatgtcacctggagaaactgcaggtggaatactgcaatctcacagcagcctcgtgcgaaagcttggcgagcgctctgcgtgccaaacgccattttaaagaattagcggtttcgaacaacgaactgggtgaagcaggcgtgcgcgtactttgtcgtgggctggtggatagtgcgtgccaactggaggttctgaaactggaaaattgtggattgacctctgcctcctgcgaggatctttgtggtgtggtcgctagcaaaccaagcctccaggaattggacctcggccgtaacaaattaggtgaccaaggcatcgcaacgttatgcccgcgcctgcttcacccttcatgccagattcgtgttttgtggctctgggattgtgatatcaccaccgccggctgccgcgacctctgtcgtgtattacgcgcgaaggaatccctcaaagagctgagtcttgcgggtaatgccttgggagatgaaggcgcacgtctcttgtgcgaatcgttattagaaccggcgtgccagctccagagcctttgggtgaaaagctgttctttcactgctgcttcatgccagcattttagttcgatgttggcgcgcaacaagtgtcttgtcgagctccaattgagcaataataaattaggtgattgtggcgtgcagcagctttgccaagggttatctcaaccaggtgccgccctccaggttttgtggttgggcgactgtgatgtagcacatagtggctgtgcaagcttagcttccgtgttgcttgtcaaccgttccttacgcgaactcgaccttagtaacaactgcatgggcgaagaagggattctccgtttgatggagagcctgctgcaaccgggatgcgtgcttgaacagttggtcctctatgacatctactggtcggaggagatggataattctttacgtgccttagaagagcgcaaaccgtcattgcgcgtgattttc

SEQ ID NO: 302 - protein, 468 aa, synthetic construct
  REGION 1..468: note = Variant of RNase inhibitor
MHHHHHHGGSGTMSLDIQCQQLSDARWTELLPLLQQSEVVRLDDCGLTEMRCKDISSALQANPSLTELSLCTNELGDAGVHLVLQGLQSPTCKIEKLSLQNCCLTKTGCGVLPDMLRSMPTLRELYLNDNPLGDAGLQLLCSGLLDPQCHLEKLQVEYCNLTAASCESLASALRAKRHFKELAVSNNELGEAGVRVLCRGLVDSACQLEVLKLENCGLTSASCEDLCGVVASKPSLQELDLGRNKLGDQGIATLCPRLLHPSCQIRVLWLWDCDITTAGCRDLCRVLRAKESLKELSLAGNALGDEGARLLCESLLEPACQLQSLWVKSCSFTAASCQHFSSMLARNKCLVELQLSNNKLGDCGVQQLCQGLSQPGAALQVLWLGDCDVAHSGCASLASVLLVNRSLRELDLSNNCMGEEGILRLMESLLQPGCVLEQLVLYDIYWSEEMDNSLRALEERKPSLRVIF

SEQ ID NO: 303 - DNA, 1404 bp, synthetic construct
  misc_feature 1..1404: note = Variant of RNase inhibitor
  source 1..1404: mol_type = other DNA
atgcaccatcatcatcatcatggcggtagcggcaccatgtctctggatattcagtgtcaacaattgtcagatgcgcgttggacggaactgttaccgcttctgcaacagagcgaagtggtgcgcctggatgactgcggcctcactgagatgcgctgcaaagacatcagtagtgcactgcaagccaacccatcgttgaccgaattaagcctgtgtacaaatgagctgggtgatgctggagttcatttagtcctgcagggcttgcagtctcctacctgcaagattgaaaaactgtccctccagaactgttgtctgacgaagactggttgcggtgtattaccggacatgcttcgttcaatgcccaccctgcgcgaactgtatctgaatgataacccgttgggcgatgcgggcctccagctgctttgctccgggctgttagacccgcaatgtcacctggagaaactgcaggtggaatactgcaatctcacagcagcctcgtgcgaaagcttggcgagcgctctgcgtgccaaacgccattttaaagaattagcggtttcgaacaacgaactgggtgaagcaggcgtgcgcgtactttgtcgtgggctggtggatagtgcgtgccaactggaggttctgaaactggaaaattgtggattgacctctgcctcctgcgaggatctttgtggtgtggtcgctagcaaaccaagcctccaggaattggaccttggcatgaacaaattaggtgaccaaggcatcgcaacgttatgcccgtttctgcttcacccttcatgccagattcgtgttttgtggctctgggattgtgatatcaccaccgccggctgccgcgacctctgtcgtgtattacgcgcgaaggaatccctcaaagagctgagtcttgcgggtaatgccttgggagatgaaggcgcacgtctcttgtgcgaatcgttattagaaccggcgtgccagctccagagcctttgggtgaaaagctgttctttcactgctgcttcatgccagcattttagttcgatgttggcgcgcaacaagtgtcttgtcgagctccaattgagcaataataaattaggtgattgtggcgtgcagcagctttgccaagggttatctcaaccaggtgccgccctccaggttttgtggttgggcgactgtgatgtagcacatagtggctgtctgagcttagcttccgtgttgcttgtcaaccgttccttacgcgaactcgaccttagtaacaactgcatgggcgaagaagggattctccgtttgatggagagcgttgaacaaccgggatgcgtgcttgaacagttggtcctctatgacatctactggtcggaggagatggataattctttacgtgccttagaagagcgcaaaccgtcattgcgcgtgattttc

SEQ ID NO: 304 - protein, 468 aa, synthetic construct
  REGION 1..468: note = Variant of RNase inhibitor
MHHHHHHGGSGTMSLDIQCQQLSDARWTELLPLLQQSEVVRLDDCGLTEMRCKDISSALQANPSLTELSLCTNELGDAGVHLVLQGLQSPTCKIEKLSLQNCCLTKTGCGVLPDMLRSMPTLRELYLNDNPLGDAGLQLLCSGLLDPQCHLEKLQVEYCNLTAASCESLASALRAKRHFKELAVSNNELGEAGVRVLCRGLVDSACQLEVLKLENCGLTSASCEDLCGVVASKPSLQELDLGMNKLGDQGIATLCPFLLHPSCQIRVLWLWDCDITTAGCRDLCRVLRAKESLKELSLAGNALGDEGARLLCESLLEPACQLQSLWVKSCSFTAASCQHFSSMLARNKCLVELQLSNNKLGDCGVQQLCQGLSQPGAALQVLWLGDCDVAHSGCLSLASVLLVNRSLRELDLSNNCMGEEGILRLMESVEQPGCVLEQLVLYDIYWSEEMDNSLRALEERKPSLRVIF

SEQ ID NO: 305 - DNA, 1404 bp, synthetic construct
  misc_feature 1..1404: note = Variant of RNase inhibitor
  source 1..1404: mol_type = other DNA
atgcaccatcatcatcatcatggcggtagcggcaccatgtctctggatattcagtgtcaacaattgtcagatgcgcgttggacggaactgttaccgcttctgcaacagagcgaagtggtgcgcctggatgactgcggcctcactgagatgcgctgcaaagacatcagtagtgcactgcaagccaacccatcgttgaccgaattaagcctgtgtacaaatgagctgggtgatgctggagttcatttagtcctgcagggcttgcagtctcctacctgcaagattgaaaaactgtccctccagaactgttgtctgacgaagactggttgcggtgtattaccggacatgcttcgttcaatgcccaccctgcgcgaactgtatctgaatgataacccgttgggcgatgcgggcctccagctgctttgctccgggctgttagacccgcaatgtcacctggagaaactgcaggtggaatactgcaatctcacagcagcctcgtgcgaaagcttggcgagcgctctgcgtgccaaacgccattttaaagaattagcggtttcgaacaacgaactgggtgaagcaggcgtgcgcgtactttgtcgtgggctggtggatagtgcgtgccaactggaggttctgaaactggaaaattgtggattgacctctgcctcctgcgaggatctttgtggtgtggtcgctagcaaaccaagcctccaggaattggaccttggcagtaacaaattaggtgaccaaggcatcgcaacgttatgcccgaccctgcttcacccttcatgccagattcgtgttttgtggctctggaactgtgatatcaccaccgccggctgccgcgacctctgtcgtgtattacgcgcgaaggaatccctcaaagagctgagtcttgcgggtaatgccttgggagatgaaggcgcacgtctcttgtgcgaatcgttattagaaccggcgtgccagctccagagcctttgggtgaaaagctgttctttcactgctgcttcatgccagcattttagttcgatgttgacgcgcaacacgtgtcttaaggagctccaattgagcaataataaattaggtgattgtggcgtgcagcagctttgccaagggttatctcaaccaggtgccgccctccaggttttgtggttgggcgactgtgatgtagcacatagtggctgtgcaagcttagcttccctgttgcttgtcaaccgttccttacgcgaactcgaccttagtaacaactgcatgggcgaagaagggattctccgtttgatggagagcctggagcaaccgggatgcgtgcttgaacagttggtcctctatgacatctactggtcggaggagatggataattctttacgtgccttagaagagcgcaaaccgtcattgcgcgtgattttc

SEQ ID NO: 306 - protein, 468 aa, synthetic construct
  REGION 1..468: note = Variant of RNase inhibitor
MHHHHHHGGSGTMSLDIQCQQLSDARWTELLPLLQQSEVVRLDDCGLTEMRCKDISSALQANPSLTELSLCTNELGDAGVHLVLQGLQSPTCKIEKLSLQNCCLTKTGCGVLPDMLRSMPTLRELYLNDNPLGDAGLQLLCSGLLDPQCHLEKLQVEYCNLTAASCESLASALRAKRHFKELAVSNNELGEAGVRVLCRGLVDSACQLEVLKLENCGLTSASCEDLCGVVASKPSLQELDLGSNKLGDQGIATLCPTLLHPSCQIRVLWLWNCDITTAGCRDLCRVLRAKESLKELSLAGNALGDEGARLLCESLLEPACQLQSLWVKSCSFTAASCQHFSSMLTRNTCLKELQLSNNKLGDCGVQQLCQGLSQPGAALQVLWLGDCDVAHSGCASLASLLLVNRSLRELDLSNNCMGEEGILRLMESLEQPGCVLEQLVLYDIYWSEEMDNSLRALEERKPSLRVIF

SEQ ID NO: 307 - DNA, 1404 bp, synthetic construct
  misc_feature 1..1404: note = Variant of RNase inhibitor
  source 1..1404: mol_type = other DNA
atgcaccatcatcatcatcatggcggtagcggcaccatgtctctggatattcagtgtcaacaattgtcagatgcgcgttggacggaactgttaccgcttctgcaacagagcgaagtggtgcgcctggatgactgcggcctcactgagatgcgctgcaaagacatcagtagtgcactgcaagccaacccatcgttgaccgaattaagcctgtgtacaaatgagctgggtgatgctggagttcatttagtcctgcagggcttgcagtctcctacctgcaagattgaaaaactgtccctccagaactgttgtctgacgaagactggttgcggtgtattaggcgacatgcttcgttcaatgcccaccctgcgcgaactgtatctgaatgataacccgttgggcgatgcgggcctccagctgctttgctccgggctgttagacccgcaatgtcacctggagaaactgcaggtggaatactgcaatctcacagcagcctcgtgcgaaagcttggcgagcgctctgcgtgccaaacgccattttaaagaattagcggtttcgaacaacgaactgggtgaagcaggcgtgcgcgtactttgtcgtgggctggtggatagtgcgtgccaactggaggttctgaaactggaaaattgtggattgacctctgcctcctgcgaggatctttgtggtgtggtcgctagcaaaccaagcctccaggaattggaccttggcatgaacaaattaggtgaccaaggcatcgcaacgttatgcccgcgcctgcttcacccttcatgccagattcgtcgtttgtggctctgggattgtgatatcaccaccgccggctgccgcgacctctgtcgtgtattacgcgcgaaggaatccctcaaagagctgagtcttgcgggtaatgccttgggagatgaaggcgcacgtctcttgtgcgaatcgttattagaaccggcgtgccagctccagagcctttgggtgaaaagctgttctttcactgctgcttcatgccagcattttagttcgatgttgacgcgcaacacgtgtcttgtcgagctccaattgagcaataataaattaggtgattgtggcgtgcagcagctttgccaagggttatctcaaccaggtgccgccctccaggttttgtggttgggcgactgtgatgtagcacatagtggctgtgcaagcttagcttccgtgttgcttgtcaaccgttccttacgcgaactcgaccttagtaacaactgcatgggcgaagaagggattctccgtttgatggagagcgttgaacaaccgggatgcgtgcttgaacagttggtcctctatgacatctactggtcggaggagatggataattctttacgtgccttagaagagcgcaaaccgtcattgcgcgtgattttc

SEQ ID NO: 308 - protein, 468 aa, synthetic construct
  REGION 1..468: note = Variant of RNase inhibitor
MHHHHHHGGSGTMSLDIQCQQLSDARWTELLPLLQQSEVVRLDDCGLTEMRCKDISSALQANPSLTELSLCTNELGDAGVHLVLQGLQSPTCKIEKLSLQNCCLTKTGCGVLGDMLRSMPTLRELYLNDNPLGDAGLQLLCSGLLDPQCHLEKLQVEYCNLTAASCESLASALRAKRHFKELAVSNNELGEAGVRVLCRGLVDSACQLEVLKLENCGLTSASCEDLCGVVASKPSLQELDLGMNKLGDQGIATLCPRLLHPSCQIRRLWLWDCDITTAGCRDLCRVLRAKESLKELSLAGNALGDEGARLLCESLLEPACQLQSLWVKSCSFTAASCQHFSSMLTRNTCLVELQLSNNKLGDCGVQQLCQGLSQPGAALQVLWLGDCDVAHSGCASLASVLLVNRSLRELDLSNNCMGEEGILRLMESVEQPGCVLEQLVLYDIYWSEEMDNSLRALEERKPSLRVIF

SEQ ID NO: 309 - DNA, 1404 bp, synthetic construct
  misc_feature 1..1404: note = Variant of RNase inhibitor
  source 1..1404: mol_type = other DNA
atgcaccatcatcatcatcatggcggtagcggcaccatgtctctggatattcagtgtcaacaattgtcagatgcgcgttggacggaactgttaccgcttctgcaacagagcgaagtggtgcgcctggatgactgcggcctcactgagatgcgctgcaaagacatcagtagtgcactgcaagccaacccatcgttgaccgaattaagcctgtgtacaaatgagctgggtgatgctggagttcatttagtcctgcagggcttgcagtctcctacctgcaagattgaaaaactgtccctccagaactgttgtctgacgaagactggttgcggtgtattacctgacatgcttcgttcaatgcccaccctgcgcgaactgtatctgaatgataacccgttgggcgatgcgggcctccagctgctttgctccgggctgttagacccgcaatgtcacctggagaaactgcaggtggaatactgcaatctcacagcagcctcgtgcgaaagcttggcgagcgctctgcgtgccaaacgccattttaaagaattagcggtttcgaacaacgaactgggtgaagcaggcgtgcgcgtactttgtcgtgggctggtggatagtgcgtgccaactggaggttctgaaactggaaaattgtggattgacctctgcctcctgcgaggatctttgtggtgtggtcgctagcaaaccaagcctccaggaattggaccttggcatgaacaaattaggtgaccaaggcatcgcaacgttatgcccgcgtctgcttcacccttcatgccagattcgtcgtttgtggctctgggattgtgatatcaccaccgccggctgccgcgacctctgtcgtgtattacgcgcgaaggaatccctcaaagagctgagtcttgcgggtaatgccttgggagatgaaggcgcacgtctcttgtgcgaatcgttattagaaccggcgtgccagctccagagcctttgggtgaaaagctgttctttcactgctgcttcatgccagcattttagttcgatgttgacgcgcaacacgtgtcttcgcgagctccaattgagcaataataaattaggtgattgtggcgtgcagcagctttgccaagggttatctcaaccaggtgccgccctccaggttttgtggttgggcgactgtgatgtagcacatagtggctgtgccagcttagcttccgtgttgcttgtcaaccgttccttacgcgaactcgaccttagtaacaactgcatgggcgaagaagggattctccgtttgatggagagcgttgaacaaccgggatgcgtgcttgaacagttggtcctctatgacatctactggtcggaggagatggataattctttacgtgccttagaagagcgcaaaccgtcattgcgcgtgattttc

SEQ ID NO: 310 - protein, 468 aa, synthetic construct
  REGION 1..468: note = Variant of RNase inhibitor
MHHHHHHGGSGTMSLDIQCQQLSDARWTELLPLLQQSEVVRLDDCGLTEMRCKDISSALQANPSLTELSLCTNELGDAGVHLVLQGLQSPTCKIEKLSLQNCCLTKTGCGVLPDMLRSMPTLRELYLNDNPLGDAGLQLLCSGLLDPQCHLEKLQVEYCNLTAASCESLASALRAKRHFKELAVSNNELGEAGVRVLCRGLVDSACQLEVLKLENCGLTSASCEDLCGVVASKPSLQELDLGMNKLGDQGIATLCPRLLHPSCQIRRLWLWDCDITTAGCRDLCRVLRAKESLKELSLAGNALGDEGARLLCESLLEPACQLQSLWVKSCSFTAASCQHFSSMLTRNTCLRELQLSNNKLGDCGVQQLCQGLSQPGAALQVLWLGDCDVAHSGCASLASVLLVNRSLRELDLSNNCMGEEGILRLMESVEQPGCVLEQLVLYDIYWSEEMDNSLRALEERKPSLRVIF

SEQ ID NO: 311 - DNA, 1404 bp, synthetic construct
  misc_feature 1..1404: note = Variant of RNase inhibitor
  source 1..1404: mol_type = other DNA
atgcaccatcatcatcatcatggcggtagcggcaccatgtctctggatattcagtgtcaacaattgtcagatgcgcgttggacggaactgttaccgcttctgcaacagagcgaagtggtgcgcctggatgactgcggcctcactgagatgcgctgcaaagacatcagtagtgcactgcaagccaacccatcgttgaccgaattaagcctgtgtacaaatgagctgggtgatgctggagttcatttagtcctgcagggcttgcagtctcctacctgcaagattgaaaaactgtccctccagaactgttgtctgacgaagactggttgcggtgtattaggcgacatgcttcgttcaatgcccaccctgcgcgaactgtatctgaatgataacccgttgggcgatgcgggcctccagctgctttgctccgggctgttagacccgcaatgtcacctggagaaactgcaggtggaatactgcaatctcacagcagcctcgtgcgaaagcttggcgagcgctctgcgtgccaaacgccattttaaagaattagcggtttcgaacaacgaactgggtgaagcaggcgtgcgcgtactttgtcgtgggctggtggatagtgcgtgccaactggaggttctgaaactggaaaattgtggattgacctctgcctcctgcgaggatctttgtggtgtggtcgctagcaaaccaagcctccaggaattggaccttggcgataacaaattaggtgaccaaggcatcgcaacgttatgcccgcgtctgcttcacccttcatgccagattcgtgttttgtggctctgggactgtgatatcaccaccgccggctgccgcgacctctgtcgtgtattacgcgcgaaggaatccctcaaagagctgagtcttgcgggtaatgccttgggagatgaaggcgcacgtctcttgtgcgaatcgttattagaaccggcgtgccagctccagagcctttgggtgaaaagctgttctttcactgctgcttcatgccagcattttagttcgatgttgacgcgcaacacgtgtcttgtcgagctccaattgagcaataataaattaggtgattgtggcgtgcagcagctttgccaagggttatctcaaccaggtgccgccctccaggttttgtggttgggcgactgtgatgtaagtcatagtggctgtgcaagcttagcttccgtgttgcttgtcaaccgttccttacgcgaactcgaccttagtaacaactgcatgggcgaagaagggattctccgtttgatggagagcgtggggcaaccgggatgcgtgcttgaacagttggtcctctatgacatctactggtcggaggagatggataattctttacgtgccttagaagagcgcaaaccgtcattgcgcgtgattttc

SEQ ID NO: 312 - protein, 468 aa, synthetic construct
  REGION 1..468: note = Variant of RNase inhibitor
MHHHHHHGGSGTMSLDIQCQQLSDARWTELLPLLQQSEVVRLDDCGLTEMRCKDISSALQANPSLTELSLCTNELGDAGVHLVLQGLQSPTCKIEKLSLQNCCLTKTGCGVLGDMLRSMPTLRELYLNDNPLGDAGLQLLCSGLLDPQCHLEKLQVEYCNLTAASCESLASALRAKRHFKELAVSNNELGEAGVRVLCRGLVDSACQLEVLKLENCGLTSASCEDLCGVVASKPSLQELDLGDNKLGDQGIATLCPRLLHPSCQIRVLWLWDCDITTAGCRDLCRVLRAKESLKELSLAGNALGDEGARLLCESLLEPACQLQSLWVKSCSFTAASCQHFSSMLTRNTCLVELQLSNNKLGDCGVQQLCQGLSQPGAALQVLWLGDCDVSHSGCASLASVLLVNRSLRELDLSNNCMGEEGILRLMESVGQPGCVLEQLVLYDIYWSEEMDNSLRALEERKPSLRVIF

SEQ ID NO: 313 - DNA, 1404 bp, synthetic construct
  misc_feature 1..1404: note = Variant of RNase inhibitor
  source 1..1404: mol_type = other DNA
atgcaccatcatcatcatcatggcggtagcggcaccatgtctctggatattcagtgtcaacaattgtcagatgcgcgttggacggaactgttaccgcttctgcaacagagcgaagtggtgcgcctggatgactgcggcctcactgagatgcgctgcaaagacatcagtagtgcactgcaagccaacccatcgttgaccgaattaagcctgtgtacaaatgagctgggtgatgctggagttcatttagtcctgcagggcttgcagtctcctacctgcaagattgaaaaactgtccctccagaactgttgtctgacgaagactggttgcggtgtattacctgacatgcttcgttcaatgcccaccctgcgcgaactgtatctgaatgataacccgttgggcgatgcgggcctccagctgctttgctccgggctgttagacccgcaatgtcacctggagaaactgcaggtggaatactgcaatctcacagcagcctcgtgcgaaagcttggcgagcgctctgcgtgccaaacgccattttaaagaattagcggtttcgaacaacgaactgggtgaagcaggcgtgcgcgtactttgtcgtgggctggtggatagtgcgtgccaactggaggttctgaaactggaaaattgtggattgacctctgcctcctgcgaggatctttgtggtgtggtcgctagcaaaccaagcctccaggaattggaccttggcagtaacaaattaggtgaccaaggcatcgcaacgttatgcccgcgcctgcttcacccttcatgccagattcgtcgtttgtggctctgggattgtgatatcaccaccgccggctgccgcgacctctgtcgtgtattacgcgcgaaggaatccctcaaagagctgagtcttgcgggtaatgccttgggagatgaaggcgcacgtctcttgtgcgaatcgttattagaaccggcgtgccagctccagagcctttgggtgaaaagctgttctttcactgctgcttcatgccagcattttagttcgatgttgacgcgcaacacgtgtcttaaggagctccaattgagcaataataaattaggtgattgtggcgtgcagcagctttgccaagggttatctcaaccaggtgccgccctccaggttttgtggttgggcgactgtgatgtagcacatagtggctgtgcaagcttagcttccctgttgcttgtcaaccgttccttacgcgaactcgaccttagtaacaactgcatgggcgaagaagggattctccgtttgatggagagcgttgaacaaccgggatgcgtgcttgaacagttggtcctctatgacatctactggtcggaggagatggataattctttacgtgccttagaagagcgcaaaccgtcattgcgcgtgattttc

SEQ ID NO: 314 - protein, 468 aa, synthetic construct
  REGION 1..468: note = Variant of RNase inhibitor
MHHHHHHGGSGTMSLDIQCQQLSDARWTELLPLLQQSEVVRLDDCGLTEMRCKDISSALQANPSLTELSLCTNELGDAGVHLVLQGLQSPTCKIEKLSLQNCCLTKTGCGVLPDMLRSMPTLRELYLNDNPLGDAGLQLLCSGLLDPQCHLEKLQVEYCNLTAASCESLASALRAKRHFKELAVSNNELGEAGVRVLCRGLVDSACQLEVLKLENCGLTSASCEDLCGVVASKPSLQELDLGSNKLGDQGIATLCPRLLHPSCQIRRLWLWDCDITTAGCRDLCRVLRAKESLKELSLAGNALGDEGARLLCESLLEPACQLQSLWVKSCSFTAASCQHFSSMLTRNTCLKELQLSNNKLGDCGVQQLCQGLSQPGAALQVLWLGDCDVAHSGCASLASLLLVNRSLRELDLSNNCMGEEGILRLMESVEQPGCVLEQLVLYDIYWSEEMDNSLRALEERKPSLRVIF

SEQ ID NO: 315 - DNA, 1404 bp, synthetic construct
  misc_feature 1..1404: note = Variant of RNase inhibitor
  source 1..1404: mol_type = other DNA
atgcaccatcatcatcatcatggcggtagcggcaccatgtctctggatattcagtgtcaacaattgtcagatgcgcgttggacggaactgttaccgcttctgcaacagagcgaagtggtgcgcctggatgactgcggcctcactgagatgcgctgcaaagacatcagtagtgcactgcaagccaacccatcgttgaccgaattaagcctgtgtacaaatgagctgggtgatgctggagttcatttagtcctgcagggcttgcagtctcctacctgcaagattgaaaaactgtccctccagaactgttgtctgacgaagactggttgcggtgtattaccggacatgcttcgttcaatgcccaccctgcgcgaactgtatctgaatgataacccgttgggcgatgcgggcctccagctgctttgctccgggctgttagacccgcaatgtcacctggagaaactgcaggtggaatactgcaatctcacagcagcctcgtgcgaaagcttggcgagcgctctgcgtgccaaacgccattttaaagaattagcggtttcgaacaacgaactgggtgaagcaggcgtgcgcgtactttgtcgtgggctggtggatagtgcgtgccaactggaggttctgaaactggaaaattgtggattgacctctgcctcctgcgaggatctttgtggtgtggtcgctagcaaaccaagcctccaggaattggaccttggcgataacaaattaggtgaccaaggcatcgcaacgttatgcccgcgcctgcttcacccttcatgccagattcgtgttttgtggctctgggattgtgatatcaccaccgccggctgccgcgacctctgtcgtgtattacgcgcgaaggaatccctcaaagagctgagtcttgcgggtaatgccttgggagatgaaggcgcacgtctcttgtgcgaatcgttattagaaccggcgtgccagctccagagcctttgggtgaaaagctgttctttcactgctgcttcatgccagcattttagttcgatgttgacgcgcaacacgtgtcttgtcgagctccaattgagcaataataaattaggtgattgtggcgtgcagcagctttgccaagggttatctcaaccaggtgccgccctccaggttttgtggttgggcgactgtgatgtagcacatagtggctgtgcaagcttagcttccgtgttgcttgtcaaccgttccttacgcgaactcgaccttagtaacaactgcatgggcgaagaagggattctccgtttgatggagagcctggggcaaccgggatgcgtgcttgaacagttggtcctctatgacatctactggtcggaggagatggataattctttacgtgccttagaagagcgcaaaccgtcattgcgcgtgattttc

SEQ ID NO: 316 - protein, 468 aa, synthetic construct
  REGION 1..468: note = Variant of RNase inhibitor
MHHHHHHGGSGTMSLDIQCQQLSDARWTELLPLLQQSEVVRLDDCGLTEMRCKDISSALQANPSLTELSLCTNELGDAGVHLVLQGLQSPTCKIEKLSLQNCCLTKTGCGVLPDMLRSMPTLRELYLNDNPLGDAGLQLLCSGLLDPQCHLEKLQVEYCNLTAASCESLASALRAKRHFKELAVSNNELGEAGVRVLCRGLVDSACQLEVLKLENCGLTSASCEDLCGVVASKPSLQELDLGDNKLGDQGIATLCPRLLHPSCQIRVLWLWDCDITTAGCRDLCRVLRAKESLKELSLAGNALGDEGARLLCESLLEPACQLQSLWVKSCSFTAASCQHFSSMLTRNTCLVELQLSNNKLGDCGVQQLCQGLSQPGAALQVLWLGDCDVAHSGCASLASVLLVNRSLRELDLSNNCMGEEGILRLMESLGQPGCVLEQLVLYDIYWSEEMDNSLRALEERKPSLRVIF

SEQ ID NO: 317 - DNA, 1404 bp, synthetic construct
  misc_feature 1..1404: note = Variant of RNase inhibitor
  source 1..1404: mol_type = other DNA
atgcaccatcatcatcatcatggcggtagcggcaccatgtctctggatattcagtgtcaacaattgtcagatgcgcgttggacggaactgttaccgcttctgcaacagagcgaagtggtgcgcctggatgactgcggcctcactgagatgcgctgcaaagacatcagtagtgcactgcaagccaacccatcgttgaccgaattaagcctgtgtacaaatgagctgggtgatgctggagttcatttagtcctgcagggcttgcagtctcctacctgcaagattgaaaaactgtccctccagaactgttgtctgacgaagactggttgcggtgtattaggcgacatgcttcgttcaatgcccaccctgcgcgaactgtatctgaatgataacccgttgggcgatgcgggcctccagctgctttgctccgggctgttagacccgcaatgtcacctggagaaactgcaggtggaatactgcaatctcacagcagcctcgtgcgaaagcttggcgagcgctctgcgtgccaaacgccattttaaagaattagcggtttcgaacaacgaactgggtgaagcaggcgtgcgcgtactttgtcgtgggctggtggatagtgcgtgccaactggaggttctgaaactggaaaattgtggattgacctctgcctcctgcgaggatctttgtggtgtggtcgctagcaaaccaagcctccaggaattggaccttggcatgaacaaattaggtgaccaaggcatcgcaacgttatgcccgaccctgcttcacccttcatgccagattcgtgttttgtggctctggaactgtgatatcaccaccgccggctgccgcgacctctgtcgtgtattacgcgcgaaggaatccctcaaagagctgagtcttgcgggtaatgccttgggagatgaaggcgcacgtctcttgtgcgaatcgttattagaaccggcgtgccagctcgaaagcctttgggtgaaaagctgttctttcactgctgcttcatgccagcattttagttcgatgttgacgcgcaacacgtgtcttgtcgagctccaattgagcaataataaattaggtgattgtggcgtgcagcagctttgccaagggttatctcaaccaggtgccgccctccaggttttgtggttgggcgactgtgatgtaggtcatagtggctgtgcaagcttagcttccgtgttgcttgtcaaccgttccttacgcgaactcgaccttagtaacaactgcatgggcgaagaagggattctccgtttgatggagagcgttgaacaaccgggatgcgtgcttgaacagttggtcctctatgacatctactggtcggaggagatggataataagttacgtgccttagaagagcgcaaaccgtcattgcgcgtgattttc

SEQ ID NO: 318 - protein, 468 aa, synthetic construct
  REGION 1..468: note = Variant of RNase inhibitor
MHHHHHHGGSGTMSLDIQCQQLSDARWTELLPLLQQSEVVRLDDCGLTEMRCKDISSALQANPSLTELSLCTNELGDAGVHLVLQGLQSPTCKIEKLSLQNCCLTKTGCGVLGDMLRSMPTLRELYLNDNPLGDAGLQLLCSGLLDPQCHLEKLQVEYCNLTAASCESLASALRAKRHFKELAVSNNELGEAGVRVLCRGLVDSACQLEVLKLENCGLTSASCEDLCGVVASKPSLQELDLGMNKLGDQGIATLCPTLLHPSCQIRVLWLWNCDITTAGCRDLCRVLRAKESLKELSLAGNALGDEGARLLCESLLEPACQLESLWVKSCSFTAASCQHFSSMLTRNTCLVELQLSNNKLGDCGVQQLCQGLSQPGAALQVLWLGDCDVGHSGCASLASVLLVNRSLRELDLSNNCMGEEGILRLMESVEQPGCVLEQLVLYDIYWSEEMDNKLRALEERKPSLRVIF

SEQ ID NO: 319 - DNA, 1404 bp, synthetic construct
  misc_feature 1..1404: note = Variant of RNase inhibitor
  source 1..1404: mol_type = other DNA
atgcaccatcatcatcatcatggcggtagcggcaccatgtctctggatattcagtgtcaacaattgtcagatgcgcgttggacggaactgttaccgcttctgcaacagagcgaagtggtgcgcctggatgactgcggcctcactgagatgcgctgcaaagacatcagtagtgcactgcaagccaacccatcgttgaccgaattaagcctgtgtacaaatgagctgggtgatgctggagttcatttagtcctgcagggcttgcagtctcctacctgcaagattgaaaaactgtccctccagaactgttgtctgacgaagactggttgcggtgtattaggcgacatgcttcgttcaatgcccaccctgcgcgaactgtatctgaatgataacccgttgggcgatgcgggcctccagctgctttgctccgggctgttagacccgcaatgtcacctggagaaactgcaggtggaatactgcaatctcacagcagcctcgtgcgaaagcttggcgagcgctctgcgtgccaaacgccattttaaagaattagcggtttcgaacaacgaactgggtgaagcaggcgtgcgcgtactttgtcgtgggctggtggatagtgcgtgccaactggaggttctgaaactggaaaattgtggattgacctctgcctcctgcgaggatctttgtggtgtggtcgctagcaaaccaagcctccaggaattggaccttggcatgaacaaattaggtgaccaaggcatcgcaacgttatgcccgaccctgcttcacccttcatgccagattcgtgttttgtggctctggaactgtgatatcaccaccgccggctgccgcgacctctgtcgtgtattacgcgcgaaggaatccctcaaagagctgagtcttgcgggtaatgccttgggagatgaaggcgcacgtctcttgtgcgaatcgttattagaaccggcgtgccagctcgaaagcctttgggtgaaaagctgttctttcactgctgcttcatgccagcattttagttcgatgttgacgcgcaacaagtgtcttgtcgagctccaattgagcaataataaattaggtgattgtggcgtgcagcagctttgccaagggttatctcaaccaggtgcggccctccaggttttgtggttgggcgactgtgatgtaggtcatagtggctgtgcaagcttagcttccgtgttgcttgtcaaccgttccttacgcgaactcgaccttagtaacaactgcatgggcgaagaagggattctccgtttgatggagagcgttgaacaaccgggatgcgtgcttgaacagttggtcctctatgacatctactggtcggaggagatggatcgttcgttacgtgccttagaagagcgcaaaccgtcattgcgcgtgattttc

SEQ ID NO: 320 - protein, 468 aa, synthetic construct
  REGION 1..468: note = Variant of RNase inhibitor
MHHHHHHGGSGTMSLDIQCQQLSDARWTELLPLLQQSEVVRLDDCGLTEMRCKDISSALQANPSLTELSLCTNELGDAGVHLVLQGLQSPTCKIEKLSLQNCCLTKTGCGVLGDMLRSMPTLRELYLNDNPLGDAGLQLLCSGLLDPQCHLEKLQVEYCNLTAASCESLASALRAKRHFKELAVSNNELGEAGVRVLCRGLVDSACQLEVLKLENCGLTSASCEDLCGVVASKPSLQELDLGMNKLGDQGIATLCPTLLHPSCQIRVLWLWNCDITTAGCRDLCRVLRAKESLKELSLAGNALGDEGARLLCESLLEPACQLESLWVKSCSFTAASCQHFSSMLTRNKCLVELQLSNNKLGDCGVQQLCQGLSQPGAALQVLWLGDCDVGHSGCASLASVLLVNRSLRELDLSNNCMGEEGILRLMESVEQPGCVLEQLVLYDIYWSEEMDRSLRALEERKPSLRVIF

SEQ ID NO: 321 - DNA, 1404 bp, synthetic construct
  misc_feature 1..1404: note = Variant of RNase inhibitor
  source 1..1404: mol_type = other DNA
atgcaccatcatcatcatcatggcggtagcggcaccatgtctctggatattcagtgtcaacaattgtcagatgcgcgttggacggaactgttaccgcttctgcaacagagcgaagtggtgcgcctggatgactgcggcctcactgagatgcgctgcaaagacatcagtagtgcactgcaagccaacccatcgttgaccgaattaagcctgtgtacaaatgagctgggtgatgctggagttcatttagtcctgcagggcttgcagtctcctacctgcaagattgaaaaactgtccctccagaactgttgtctgacgaagactggttgcggtgtattaggcgacatgcttcgttcaatgcccaccctgcgcgaactgtatctgaatgataacccgttgggcgatgcgggcctccagctgctttgctccgggctgttagacccgcaatgtcacctggagaaactgcaggtggaatactgcaatctcacagcagcctcgtgcgaaagcttggcgagcgctctgcgtgccaaacgccattttaaagaattagcggtttcgaacaacgaactgggtgaagcaggcgtgcgcgtactttgtcgtgggctggtggatagtgcgtgccaactggaggttctgaaactggaaaattgtggattgacctctgcctcctgcgaggatctttgtggtgtggtcgctagcaaaccaagcctccaggaattggaccttggcatgaacaaattaggtgaccaaggcatcgcaacgttatgcccgaccctgcttcacccttcatgccagattcgtgttttgtggctctggaactgtgatatcaccaccgccggctgccgcgacctctgtcgtgtattacgcgcgaaggaatccctcaaagagctgagtcttgcgggtaatgccttgggagatgaaggcgcacgtctcttgtgcgaatcgttattagaaccggcgtgccagctccagagcctttgggtgaaaagctgttctttcactgctgcttcatgccagcattttagttcgatgttgacgcgcaacacgtgtcttgtcgagctccaattgagcaataataaattaggtgattgtggcgtgcagcagctttgccaagggttatctcaaccaggtgccgccctccaggttttgtggttgggcgactgtgatgtaggtcatagtggctgtgcaagcttagcttccgtgttgcttgtcaaccgttccttacgcgaactcgaccttagtaacaactgcatgggcgaagaagggattctccgtttgatggagagcgttgaacaaccgggatgcgtgcttgaacagttggtcctctatgacatctactggtcggaggagatggatcgtgcgttacgtgccttagaagagcgcaaaccgtcattgcgcgtgattttc

SEQ ID NO: 322 - protein, 468 aa, synthetic construct
  REGION 1..468: note = Variant of RNase inhibitor
MHHHHHHGGSGTMSLDIQCQQLSDARWTELLPLLQQSEVVRLDDCGLTEMRCKDISSALQANPSLTELSLCTNELGDAGVHLVLQGLQSPTCKIEKLSLQNCCLTKTGCGVLGDMLRSMPTLRELYLNDNPLGDAGLQLLCSGLLDPQCHLEKLQVEYCNLTAASCESLASALRAKRHFKELAVSNNELGEAGVRVLCRGLVDSACQLEVLKLENCGLTSASCEDLCGVVASKPSLQELDLGMNKLGDQGIATLCPTLLHPSCQIRVLWLWNCDITTAGCRDLCRVLRAKESLKELSLAGNALGDEGARLLCESLLEPACQLQSLWVKSCSFTAASCQHFSSMLTRNTCLVELQLSNNKLGDCGVQQLCQGLSQPGAALQVLWLGDCDVGHSGCASLASVLLVNRSLRELDLSNNCMGEEGILRLMESVEQPGCVLEQLVLYDIYWSEEMDRALRALEERKPSLRVIF

SEQ ID NO: 323 - DNA, 1404 bp, synthetic construct
  misc_feature 1..1404: note = Variant of RNase inhibitor
  source 1..1404: mol_type = other DNA
atgcaccatcatcatcatcatggcggtagcggcaccatgtctctggatattcagtgtcaacaattgtcagatgcgcgttggacggaactgttaccgcttctgcaacagagcgaagtggtgcgcctggatgactgcggcctcactgagatgcgctgcaaagacatcagtagtgcactgcaagccaacccatcgttgaccgaattaagcctgtgtacaaatgagctgggtgatgctggagttcatttagtcctgcagggcttgcagtctcctacctgcaagattgaaaaactgtccctccagaactgttgtctgacgaagactggttgcggtgtattaggcgacatgcttcgttcaatgcccaccctgcgcgaactgtatctgaatgataacccgttgggcgatgcgggcctccagctgctttgctccgggctgttagacccgcaatgtcacctggagaaactgcaggtggaatactgcaatctcacagcagcctcgtgcgaaagcttggcgagcgctctgcgtgccaaacgccattttaaagaattagcggtttcgaacaacgaactgggtgaagcaggcgtgcgcgtactttgtcgtgggctggtggatagtgcgtgccaactggaggttctgaaactggaaaattgtggattgacctctgcctcctgcgaggatctttgtggtgtggtcgctagcaaaccaagcctccaggaattggaccttggcatgaacaaattaggtgaccaaggcatcgcaacgttatgcccgaccctgcttcacccttcatgccagattcgtgttttgtggctctggaactgtgatatcaccaccgccggctgccgcgacctctgtcgtgtattacgcgcgaaggaatccctcaaagagctgagtcttgcgggtaatgccttgggagatgaaggcgcacgtctcttgtgcgaatcgttattagaaccggcgtgccagctcgaaagcctttgggtgaaaagctgttctttcactgctgcttcatgccagcattttagttcgatgttgacgcgcaacacgtgtcttcgcgagctccaattgagcaataataaattaggtgattgtggcgtgcagcagctttgccaagggttatctcaaccaggtgccgccctccaggttttgtggttgggcgactgtgatgtaggtcatagtggctgtgcaagcttagcttccgtgttgcttgtcaaccgttccttacgcgaactcgaccttagtaacaactgcatgggcgaagaagggattctccgtttgatggagagcgtgctgcaaccgggatgcgtgcttgaacagttggtcctctatgacatctactggtcggaggagatggatcgtgcgttacgtgccttagaagagcgcaaaccgtcattgcgcgtgattttc

SEQ ID NO: 324 - protein, 468 aa, synthetic construct
  REGION 1..468: note = Variant of RNase inhibitor
MHHHHHHGGSGTMSLDIQCQQLSDARWTELLPLLQQSEVVRLDDCGLTEMRCKDISSALQANPSLTELSLCTNELGDAGVHLVLQGLQSPTCKIEKLSLQNCCLTKTGCGVLGDMLRSMPTLRELYLNDNPLGDAGLQLLCSGLLDPQCHLEKLQVEYCNLTAASCESLASALRAKRHFKELAVSNNELGEAGVRVLCRGLVDSACQLEVLKLENCGLTSASCEDLCGVVASKPSLQELDLGMNKLGDQGIATLCPTLLHPSCQIRVLWLWNCDITTAGCRDLCRVLRAKESLKELSLAGNALGDEGARLLCESLLEPACQLESLWVKSCSFTAASCQHFSSMLTRNTCLRELQLSNNKLGDCGVQQLCQGLSQPGAALQVLWLGDCDVGHSGCASLASVLLVNRSLRELDLSNNCMGEEGILRLMESVLQPGCVLEQLVLYDIYWSEEMDRALRALEERKPSLRVIF

SEQ ID NO: 325 - DNA, 1404 bp, synthetic construct
  misc_feature 1..1404: note = Variant of RNase inhibitor
  source 1..1404: mol_type = other DNA
atgcaccatcatcatcatcatggcggtagcggcaccatgtctctggatattcagtgtcaacaattgtcagatgcgcgttggacggaactgttaccgcttctgcaacagagcgaagtggtgcgcctggatgactgcggcctcactgagatgcgctgcaaagacatcagtagtgcactgcaagccaacccatcgttgaccgaattaagcctgtgtacaaatgagctgggtgatgctggagttcatttagtcctgcagggcttgcagtctcctacctgcaagattgaaaaactgtccctccagaactgttgtctgacgaagactggttgcggtgtattaggcgacatgcttcgttcaatgcccaccctgcgcgaactgtatctgaatgataacccgttgggcgatgcgggcctccagctgctttgctccgggctgttagacccgcaatgtcacctggagaaactgcaggtggaatactgcaatctcacagcagcctcgtgcgaaagcttggcgagcgctctgcgtgccaaacgccattttaaagaattagcggtttcgaacaacgaactgggtgaagcaggcgtgcgcgtactttgtcgtgggctggtggatagtgcgtgccaactggaggttctgaaactggaaaattgtggattgacctctgcctcctgcgaggatctttgtggtgtggtcgctagcaaaccaagcctccaggaattggaccttggcatgaacaaattaggtgaccaaggcatcgcaacgttatgcccgaccctgcttcacccttcatgccagattcgtgttttgtggctctggaactgtgatatcaccaccgccggctgccgcgacctctgtcgtgtattacgcgcgaagccgtccctcaaagagctgagtcttgcgggtaatgccttgggagatgaaggcgcacgtctcttgtgcgaatcgttattagaaccggcgtgccagctccagagcctttgggtgaaaagctgttctttcactgctgcttcatgccagcattttagttcgatgttgacgcgcaacacgtgtcttgtcgagctccaattgagcaataataaattaggtgattgtggcgtgcagcagctttgccaagggttatctcaaccaggtgccgccctccaggttttgtggttgggcgactgtgatgtaggtcatagtggctgtgcaagcttagcttccgtgttgcttgtcaaccgttccttacgcgaactcgaccttagtaacaactgcatgggcgaagaagggattctccgtttgatggagagcgttgaacaaccgggatgcgtgcttgaacagttggtcctctatgacatctactggtcggaggagatggataattctttacgtgccttagaagagcgcaaaccgtcattgcgcgtgattttc

SEQ ID NO: 326 - protein, 468 aa, synthetic construct
  REGION 1..468: note = Variant of RNase inhibitor
MHHHHHHGGSGTMSLDIQCQQLSDARWTELLPLLQQSEVVRLDDCGLTEMRCKDISSALQANPSLTELSLCTNELGDAGVHLVLQGLQSPTCKIEKLSLQNCCLTKTGCGVLGDMLRSMPTLRELYLNDNPLGDAGLQLLCSGLLDPQCHLEKLQVEYCNLTAASCESLASALRAKRHFKELAVSNNELGEAGVRVLCRGLVDSACQLEVLKLENCGLTSASCEDLCGVVASKPSLQELDLGMNKLGDQGIATLCPTLLHPSCQIRVLWLWNCDITTAGCRDLCRVLRAKPSLKELSLAGNALGDEGARLLCESLLEPACQLQSLWVKSCSFTAASCQHFSSMLTRNTCLVELQLSNNKLGDCGVQQLCQGLSQPGAALQVLWLGDCDVGHSGCASLASVLLVNRSLRELDLSNNCMGEEGILRLMESVEQPGCVLEQLVLYDIYWSEEMDNSLRALEERKPSLRVIF

SEQ ID NO: 327 - DNA, 1404 bp, synthetic construct
  misc_feature 1..1404: note = Variant of RNase inhibitor
  source 1..1404: mol_type = other DNA
atgcaccatcatcatcatcatggcggtagcggcaccatgtctctggatattcagtgtcaacaattgtcagatgcgcgttggacggaactgttaccgcttctgcaacagagcgaagtggtgcgcctggatgactgcggcctcactgagatgcgctgcaaagacatcagtagtgcactgcaagccaacccatcgttgaccgaattaagcctgtgtacaaatgagctgggtgatgctggagttcatttagtcctgcagggcttgcagtctcctacctgcaagattgaaaaactgtccctccagaactgttgtctgacgaagactggttgcggtgtattaggcgacatgcttcgttcaatgcccaccctgcgcgaactgtatctgaatgataacccgttgggcgatgcgggcctccagctgctttgctccgggctggaggacccgcaatgtcacctggagaaactgcaggtggaatactgcaatctcacagcagcctcgtgcgaaagcttggcgagcgctctgcgtgccaaacgccattttaaagaattagcggtttcgaacaacgaactgggtgaagcaggcgtgcgcgtactttgtcgtgggctggtggatagtgcgtgccaactggaggttctgaaactggaaaattgtggattgacctctgcctcctgcgaggatctttgtggtgtggtcgctagcaaaccaagcctccaggaattggaccttggcatgaacaaattaggtgaccaaggcatcgcaacgttatgcccgaccctgcttcacccttcatgccagattcgtgttttgtggctctggaactgtgatatcaccaccgccggctgccgcgacctctgtcgtgtattacgcgcgaaggaatccctcaaagagctgagtcttgcgggtaatgccttgggagatgaaggcgcacgtctcttgtgcgaatcgttattagaaccggcgtgccagctccagagcctttgggtgaaaagctgttctttcactgctgcttcatgccagcattttagttcgatgttgacgcgcaacacgtgtcttgtcgagctccaattgagcaataataaattaggtgattgtggcgtgcagcagctttgccaagggttatctcaaccaggtgccgccctccaggttttgtggttgggcgactgtgatgtaggtcatagtggctgtgcaagcttagcttccgtgttgcttgtcaaccgttccttacgcgaactcgaccttagtaacaactgcatgggcgaagaagggattctccgtttgatggagagcgttgaacaaccgggatgcgtgcttgaacagttggtcctctatgacatctactggtcggaggagatggataattctttacgtgccttagaagagcgcaaaccgtcattgcgcgtgattttc

SEQ ID NO: 328 - protein, 468 aa, synthetic construct
  REGION 1..468: note = Variant of RNase inhibitor
MHHHHHHGGSGTMSLDIQCQQLSDARWTELLPLLQQSEVVRLDDCGLTEMRCKDISSALQANPSLTELSLCTNELGDAGVHLVLQGLQSPTCKIEKLSLQNCCLTKTGCGVLGDMLRSMPTLRELYLNDNPLGDAGLQLLCSGLEDPQCHLEKLQVEYCNLTAASCESLASALRAKRHFKELAVSNNELGEAGVRVLCRGLVDSACQLEVLKLENCGLTSASCEDLCGVVASKPSLQELDLGMNKLGDQGIATLCPTLLHPSCQIRVLWLWNCDITTAGCRDLCRVLRAKESLKELSLAGNALGDEGARLLCESLLEPACQLQSLWVKSCSFTAASCQHFSSMLTRNTCLVELQLSNNKLGDCGVQQLCQGLSQPGAALQVLWLGDCDVGHSGCASLASVLLVNRSLRELDLSNNCMGEEGILRLMESVEQPGCVLEQLVLYDIYWSEEMDNSLRALEERKPSLRVIF

SEQ ID NO: 329 - DNA, 1404 bp, synthetic construct
  misc_feature 1..1404: note = Variant of RNase inhibitor
  source 1..1404: mol_type = other DNA
atgcaccatcatcatcatcatggcggtagcggcaccatgtctctggatattcagtgtcaacaattgtcagatgcgcgttggacggaactgttaccgcttctgcaacagagcgaagtggtgcgcctggatgactgcggcctcactgagatgcgctgcaaagacatcagtagtgcactgcaagccaacccatcgttgaccgaattaagcctgtgtacaaatgagctgggtgatgctggagttcatttagtcctgcagggcttgcagtctcctacctgcaagattgaaaaactgtccctccagaactgttgtctgacgaagactggttgcggtgtattaggcgacatgcttcgttcaatgcccaccctgcgcgaactgtatctgaatgataacccgttgggcgatgcgggcctccagctgctttgctccgggctgttagacccgcaatgtcacctggagaaactgcaggtggaatactgcaatctcacagcagcctcgtgcgaaagcttggcgagcgctctgcgtgccaaacgccattttaaagaattagcggtttcgaacaacgaactgggtgaagcaggcgtgcgcgtactttgtcgtgggctggtggatagtgcgtgccaactggaggttctgaaactggaaaattgtggattgacctctgcctcctgcgaggatctttgtgcggtggtcgctagcaaaccaagcctccaggaattggaccttggcatgaacaaattaggtgaccaaggcatcgcaacgttatgcccgaccctgcttcacccttcatgccagattcgtgttttgtggctctggaactgtgatatcaccaccgccggctgccgcgacctctgtcgtgtattacgcgcgaaggaatccctcaaagagctgagtcttgcgggtaatgccttgggagatgaaggcgcacgtctcttgtgcgaatcgttattagaaccggcgtgccagctccagagcctttgggtgaaaagctgttctttcactgctgcttcatgccagcattttagttcgatgttgacgcgcaacacgtgtcttgtcgagctccaattgagcaataataaattaggtgattgtggcgtgcagcagctttgccaagggttatctcaaccaggtgccgccctccaggttttgtggttgggcgactgtgatgtaggtcatagtggctgtgcaagcttagcttccgtgttgcttgtcaaccgttccttacgcgaactcgaccttagtaacaactgcatgggcgaagaagggattctccgtttgatggagagcgttgaacaaccgggatgcgtgcttgaacagttggtcctctatgacatctactggtcggaggagatggataattctttacgtgccttagaagagcgcaaaccgtcattgcgcgtgattttc

SEQ ID NO: 330 - protein, 468 aa, synthetic construct
  REGION 1..468: note = Variant of RNase inhibitor
MHHHHHHGGSGTMSLDIQCQQLSDARWTELLPLLQQSEVVRLDDCGLTEMRCKDISSALQANPSLTELSLCTNELGDAGVHLVLQGLQSPTCKIEKLSLQNCCLTKTGCGVLGDMLRSMPTLRELYLNDNPLGDAGLQLLCSGLLDPQCHLEKLQVEYCNLTAASCESLASALRAKRHFKELAVSNNELGEAGVRVLCRGLVDSACQLEVLKLENCGLTSASCEDLCAVVASKPSLQELDLGMNKLGDQGIATLCPTLLHPSCQIRVLWLWNCDITTAGCRDLCRVLRAKESLKELSLAGNALGDEGARLLCESLLEPACQLQSLWVKSCSFTAASCQHFSSMLTRNTCLVELQLSNNKLGDCGVQQLCQGLSQPGAALQVLWLGDCDVGHSGCASLASVLLVNRSLRELDLSNNCMGEEGILRLMESVEQPGCVLEQLVLYDIYWSEEMDNSLRALEERKPSLRVIF

SEQ ID NO: 331 - DNA, 1404 bp, synthetic construct
  misc_feature 1..1404: note = Variant of RNase inhibitor
  source 1..1404: mol_type = other DNA
atgcaccatcatcatcatcatggcggtagcggcaccatgtctctggatattcagtgtcaacaattgtcagatgcgcgttggacggaactgttaccgcttctgcaacagagcgaagtggtgcgcctggatgactgcggcctcactgagatgcgctgcaaagacatcagtagtgcactgcaagccaacccatcgttgaccgaattaagcctgtgtacaaatgagctgggtgatgctggagttcatttagtcctgcagggcttgcagtctcctacctgcaagattgaaaaactgtccctccagaactgttgtctgacgaagactggttgcggtgtattaggcgacatgcttcgttcaatgcccaccctgcgcgaactgtatctgaatgataacccgttgggcgatgcgggcctccagctgctttgctccgggctgttagacccgcaatgtcacctggagaaactgcaggtggaatactgcaatctcacagcagcctcgtgcgaaagcttggcgagcgctctgcgtgccaaacgccattttaaagaattagcggtttcgaacaacgaactgggtgaagcaggcgtgcgcgtactttgtcgtgggctggtggatagtgcgtgccaactggaggttctgaaactggaaaattgtggattgacctctgcctcctgcgaggatctttgtggtgtggtcgctagcaaaccaagcctccaggaattggaccttggcatgaacaaattaggtgaccaaggcatcgcaacgttatgcccgaccctgcttcacccttcatgccagattcgtgttttgtggctctggaactgtgatatcaccaccgccggctgccgcgacctctgtcgtgtattacgcgcgaaggaatccctcaaagagctgagtcttgcgggtaatgccttgggagatgaaggcgcacgtctcttgtgcgaatcgttattagaaccggcgtgccagctcgaaagcctttgggtgaaaagctgttctttcactgctgcttcatgccagcattttagttcgatgttgacgcgcaacacgtgtcttgttgagctccaattgagcaataataaattaggtgattgtggcgtgcagcagctttgccaagggttatctcaaccaggtgccgccctccaggttttgtggttgggcgactgtgatgtaggtcatagtggctgtgcaagcttagcttccgtgttgcttgtcaaccgttccttacgcgaactcgaccttagtaacaactgcatgggcgaagaagggattctccgtttgatggagagcctggagcaaccgggatgcgtgcttgaacagttggtcctctatgacatctactggtcggaggagatggataattctttacgtgccttagaagagcgcaaaccgtcattgcgcgtgattttc

SEQ ID NO: 332 - protein, 468 aa, synthetic construct
  REGION 1..468: note = Variant of RNase inhibitor
MHHHHHHGGSGTMSLDIQCQQLSDARWTELLPLLQQSEVVRLDDCGLTEMRCKDISSALQANPSLTELSLCTNELGDAGVHLVLQGLQSPTCKIEKLSLQNCCLTKTGCGVLGDMLRSMPTLRELYLNDNPLGDAGLQLLCSGLLDPQCHLEKLQVEYCNLTAASCESLASALRAKRHFKELAVSNNELGEAGVRVLCRGLVDSACQLEVLKLENCGLTSASCEDLCGVVASKPSLQELDLGMNKLGDQGIATLCPTLLHPSCQIRVLWLWNCDITTAGCRDLCRVLRAKESLKELSLAGNALGDEGARLLCESLLEPACQLESLWVKSCSFTAASCQHFSSMLTRNTCLVELQLSNNKLGDCGVQQLCQGLSQPGAALQVLWLGDCDVGHSGCASLASVLLVNRSLRELDLSNNCMGEEGILRLMESLEQPGCVLEQLVLYDIYWSEEMDNSLRALEERKPSLRVIF

SEQ ID NO: 333 - DNA, 1404 bp, synthetic construct
  misc_feature 1..1404: note = Variant of RNase inhibitor
  source 1..1404: mol_type = other DNA
atgcaccatcatcatcatcatggcggtagcggcaccatgtctctggatattcagtgtcaacaattgtcagatgcgcgttggacggaactgttaccgcttctgcaacagagcgaagtggtgcgcctggatgactgcggcctcactgagatgcgctgcaaagacatcagtagtgcactgcaagccaacccatcgttgaccgaattaagcctgtgtacaaatgagctgggtgatgctggagttcatttagtcctgcagggcttgcagtctcctacctgcaagattgaaaaactgtccctccagaactgttgtctgacgaagactggttgcggtgtattaggcgacatgcttcgttcaatgcccaccctgcgcgaactgtatctgaatgataacccgttgggcgatgcgggcctccagctgctttgctccgggctgggggacccgcaatgtcacctggagaaactgcaggtggaatactgcaatctcacagcagcctcgtgcgaaagcttggcgagcgctctgcgtgccaaacgccattttaaagaattagcggtttcgaacaacgaactgggtgaagcaggcgtgcgcgtactttgtcgtgggctggtggatagtgcgtgccaactggaggttctgaaactggaaaattgtggattgacctctgcctcctgcgaggatctttgtggtgtggtcgctagcaaaccaagcctccaggaattggaccttggcatgaacaaattaggtgaccaaggcatcgcaacgttatgcccgaccctgcttcacccttcatgccagattcgtgttttgtggctctggaactgtgatatcaccaccgccggctgccgcgacctctgtcgtgtattacgcgcgaaggaatccctcaaagagctgagtcttgcgggtaatgccttgggagatgaaggcgcacgtctcttgtgcgaatcgttattagaaccggcgtgccagctccagagcctttgggtgaaaagctgttctttcactgctgcttcatgccagcattttagttcgatgttgacgcgcaacacgtgtcttgtcgagctccaattgagcaataataaattaggtgattgtggcgtgcagcagctttgccaagggttatctcaaccaggtgccgccctccaggttttgtggttgggcgactgtgatgtaggtcatagtggctgtgcaagcttagcttccgtgttgcttgtcaaccgttccttacgcgaactcgaccttagtaacaactgcatgggcgaagaagggattctccgtttgatggagagcgttgaacaaccgggatgcgtgcttgaacagttggtcctctatgacatctactggtcggaggagatggataattctttacgtgccttagaagagcgcaaaccgtcattgcgcgtgattttc

SEQ ID NO: 334 - protein, 468 aa, synthetic construct
  REGION 1..468: note = Variant of RNase inhibitor
MHHHHHHGGSGTMSLDIQCQQLSDARWTELLPLLQQSEVVRLDDCGLTEMRCKDISSALQANPSLTELSLCTNELGDAGVHLVLQGLQSPTCKIEKLSLQNCCLTKTGCGVLGDMLRSMPTLRELYLNDNPLGDAGLQLLCSGLGDPQCHLEKLQVEYCNLTAASCESLASALRAKRHFKELAVSNNELGEAGVRVLCRGLVDSACQLEVLKLENCGLTSASCEDLCGVVASKPSLQELDLGMNKLGDQGIATLCPTLLHPSCQIRVLWLWNCDITTAGCRDLCRVLRAKESLKELSLAGNALGDEGARLLCESLLEPACQLQSLWVKSCSFTAASCQHFSSMLTRNTCLVELQLSNNKLGDCGVQQLCQGLSQPGAALQVLWLGDCDVGHSGCASLASVLLVNRSLRELDLSNNCMGEEGILRLMESVEQPGCVLEQLVLYDIYWSEEMDNSLRALEERKPSLRVIF

SEQ ID NO: 335 - DNA, 1404 bp, synthetic construct
  misc_feature 1..1404: note = Variant of RNase inhibitor
  source 1..1404: mol_type = other DNA
atgcaccatcatcatcatcatggcggtagcggcaccatgtctctggatattcagtgtcaacaattgtcagatgcgcgttggacggaactgttaccgcttctgcaacagagcgaagtggtgcgcctggatgactgcggcctcactgagatgcgctgcaaagacatcagtagtgcactgcaagccaacccatcgttgaccgaattaagcctgtgtacaaatgagctgggtgatgctggagttcatttagtcctgcagggcttgcagtctcctacctgcaagattgaaaaactgtccctccagaactgttgtctgacgaagactggttgcggtgtattaggcgacatgcttcgttcaatgcccaccctgcgcgaactgtatctgaatgataacccgttgggcgatgcgggcctccagctgctttgctccgggctgatggacccgcaatgtcacctggagaaactgcaggtggaatactgcaatctcacagcagcctcgtgcgaaagcttggcgagcgctctgcgtgccaaacgccattttaaagaattagcggtttcgaacaacgaactgggtgaagcaggcgtgcgcgtactttgtcgtgggctggtggatagtgcgtgccaactggaggttctgaaactggaaaattgtggattgacctctgcctcctgcgaggatctttgtggtgtggtcgctagcaaaccaagcctccaggaattggaccttggcatgaacaaattaggtgaccaaggcatcgcaacgttatgcccgaccctgcttcacccttcatgccagattcgtgttttgtggctctggaactgtgatatcaccaccgccggctgccgcgacctctgtcgtgtattacgcgcgaaggaatccctcaaagagctgagtcttgcgggtaatgccttgggagatgaaggcgcacgtctcttgtgcgaatcgttattagaaccggcgtgccagctccagagcctttgggtgaaaagctgttctttcactgctgcttcatgccagcattttagttcgatgttgacgcgcaacacgtgtcttgtcgagctccaattgagcaataataaattaggtgattgtggcgtgcagcagctttgccaagggttatctcaaccaggtgccgccctccaggttttgtggttgggcgactgtgatgtaggtcatagtggctgtgcaagcttagcttccgtgttgcttgtcaaccgttccttacgcgaactcgaccttagtaacaactgcatgggcgaagaagggattctccgtttgatggagagcgttgaacaaccgggatgcgtgcttgaacagttggtcctctatgacatctactggtcggaggagatggataattctttacgtgccttagaagagcgcaaaccgtcattgcgcgtgattttc

SEQ ID NO: 336 - protein, 468 aa, synthetic construct
  REGION 1..468: note = Variant of RNase inhibitor
MHHHHHHGGSGTMSLDIQCQQLSDARWTELLPLLQQSEVVRLDDCGLTEMRCKDISSALQANPSLTELSLCTNELGDAGVHLVLQGLQSPTCKIEKLSLQNCCLTKTGCGVLGDMLRSMPTLRELYLNDNPLGDAGLQLLCSGLMDPQCHLEKLQVEYCNLTAASCESLASALRAKRHFKELAVSNNELGEAGVRVLCRGLVDSACQLEVLKLENCGLTSASCEDLCGVVASKPSLQELDLGMNKLGDQGIATLCPTLLHPSCQIRVLWLWNCDITTAGCRDLCRVLRAKESLKELSLAGNALGDEGARLLCESLLEPACQLQSLWVKSCSFTAASCQHFSSMLTRNTCLVELQLSNNKLGDCGVQQLCQGLSQPGAALQVLWLGDCDVGHSGCASLASVLLVNRSLRELDLSNNCMGEEGILRLMESVEQPGCVLEQLVLYDIYWSEEMDNSLRALEERKPSLRVIF

SEQ ID NO: 337 - DNA, 1404 bp, synthetic construct
  misc_feature 1..1404: note = Variant of RNase inhibitor
  source 1..1404: mol_type = other DNA
atgcaccatcatcatcatcatggcggtagcggcaccatgtctctggatattcagtgtcaacaattgtcagatgcgcgttggacggaactgttaccgcttctgcaacagagcactgtggtgcgcctggatgactgcggcctcactgagatgcgctgcaaagacatcagtagtgcactgcaagccaacccatcgttgaccgaattaagcctgtgtacaaatgagctgggtgatgctggagttcatttagtcctgcagggcttgcagtctcctacctgcaagattgaaaaactgtccctccagaactgttgtctgacgaagactggttgcggtgtattaggcgacatgcttcgttcaatgcccaccctgcgcgaactgtatctgaatgataacccgttgggcgatgcgggcctccagctgctttgctccgggctgttagacccgcaatgtcacctggagaaactgcaggtggaatactgcaatctcacagcagcctcgtgcgaaagcttggcgagcgctctgcgtgccaaacgccattttaaagaattagcggtttcgaacaacgaactgggtgaagcaggcgtgcgcgtactttgtcgtgggctggtggatagtgcgtgccaactggaggttctgaaactggaaaattgtggattgacctctgcctcctgcgaggatctttgtggtgtggtcgctagcaaaccaagcctccaggaattggaccttggcatgaacaaattaggtgaccaaggcatcgcaacgttatgcccgaccctgcttcacccttcatgccagattcgtgttttgtggctctggaactgtgatatcaccaccgccggctgccgcgacctctgtcgtgtattacgcgcgaaggaatccctcaaagagctgagtcttgcgggtaatgccttgggagatgaaggcgcacgtctcttgtgcgaatcgttattagaaccggcgtgccagctccagagcctttgggtgaaaagctgttctttcactgctgcttcatgccagcattttagttcgatgttgacgcgcaacacgtgtcttgtcgagctccaattgagcaataataaattaggtgattgtggcgtgcagcagctttgccaagggttatctcaaccaggtgccgccctccaggttttgtggttgggcgactgtgatgtaggtcatagtggctgtgcaagcttagcttccgtgttgcttgtcaaccgttccttacgcgaactcgaccttagtaacaactgcatgggcgaagaagggattctccgtttgatggagagcgttgaacaaccgggatgcgtgcttgaacagttggtcctctatgacatctactggtcggaggagatggataattctttacgtgccttagaagagcgcaaaccgtcattgcgcgtgattttc

SEQ ID NO: 338 - protein, 468 aa, synthetic construct
  REGION 1..468: note = Variant of RNase inhibitor
MHHHHHHGGSGTMSLDIQCQQLSDARWTELLPLLQQSTVVRLDDCGLTEMRCKDISSALQANPSLTELSLCTNELGDAGVHLVLQGLQSPTCKIEKLSLQNCCLTKTGCGVLGDMLRSMPTLRELYLNDNPLGDAGLQLLCSGLLDPQCHLEKLQVEYCNLTAASCESLASALRAKRHFKELAVSNNELGEAGVRVLCRGLVDSACQLEVLKLENCGLTSASCEDLCGVVASKPSLQELDLGMNKLGDQGIATLCPTLLHPSCQIRVLWLWNCDITTAGCRDLCRVLRAKESLKELSLAGNALGDEGARLLCESLLEPACQLQSLWVKSCSFTAASCQHFSSMLTRNTCLVELQLSNNKLGDCGVQQLCQGLSQPGAALQVLWLGDCDVGHSGCASLASVLLVNRSLRELDLSNNCMGEEGILRLMESVEQPGCVLEQLVLYDIYWSEEMDNSLRALEERKPSLRVIF

SEQ ID NO: 339 - DNA, 1404 bp, synthetic construct
  misc_feature 1..1404: note = Variant of RNase inhibitor
  source 1..1404: mol_type = other DNA
atgcaccatcatcatcatcatggcggtagcggcaccatgtctctggatattcagtgtcaacaattgtcagatgcgcgttggacggaactgttaccgcttctgcaacagagcgaagtggtgcgcctggatgactgcggcctcactgagatgcgctgcaaagacatcagtagtgcactgcaagccaacccatcgttgaccgaattaagcctgtgtacaaatgagctgggtgatgctggagttcatttagtcctgcagggcttgcagtctcctacctgcaagattgaaaaactgtccctccagaactgttgtctgacgaagactggttgcggtgtattaggcgacatgcttcgttcaatgcccaccctgcgcgaactgtatctgaatgataacccgttgggcgatgcgggcctccagctgctttgctccgggctgttagacccgcaatgtcagctggagaaactgcaggtggaatactgcaatctcacagcagcctcgtgcgaaagcttggcgagcgctctgcgtgccaaacgccattttaaagaattagcggtttcgaacaacgaactgggtgaagcaggcgtgcgcgtactttgtcgtgggctggtggatagtgcgtgccaactggaggttctgaaactggaaaattgtggattgacctctgcctcctgcgaggatctttgtggtgtggtcgctagcaaaccaagcctccaggaattggaccttggcatgaacaaattaggtgaccaaggcatcgcaacgttatgcccgaccctgcttcacccttcatgccagattcgtgttttgtggctctggaactgtgatatcaccaccgccggctgccgcgacctctgtcgtgtattacgcgcgaaggaatccctcaaagagctgagtcttgcgggtaatgccttgggagatgaaggcgcacgtctcttgtgcgaatcgttattagaaccggcgtgccagctccagagcctttgggtgaaaagctgttctttcactgctgcttcatgccagcattttagttcgatgttgacgcgcaacacgtgtcttgtcgagctccaattgagcaataataaattaggtgattgtggcgtgcagcagctttgccaagggttatctcaaccaggtgccgccctccaggttttgtggttgggcgactgtgatgtaggtcatagtggctgtgcaagcttagcttccgtgttgcttgtcaaccgttccttacgcgaactcgaccttagtaacaactgcatgggcgaagaagggattctccgtttgatggagagcgttgaacaaccgggatgcgtgcttgaacagttggtcctctatgacatctactggtcggaggagatggataattctttacgtgccttagaagagcgcaaaccgtcattgcgcgtgattttc

SEQ ID NO: 340 - protein, 468 aa, synthetic construct
  REGION 1..468: note = Variant of RNase inhibitor
MHHHHHHGGSGTMSLDIQCQQLSDARWTELLPLLQQSEVVRLDDCGLTEMRCKDISSALQANPSLTELSLCTNELGDAGVHLVLQGLQSPTCKIEKLSLQNCCLTKTGCGVLGDMLRSMPTLRELYLNDNPLGDAGLQLLCSGLLDPQCQLEKLQVEYCNLTAASCESLASALRAKRHFKELAVSNNELGEAGVRVLCRGLVDSACQLEVLKLENCGLTSASCEDLCGVVASKPSLQELDLGMNKLGDQGIATLCPTLLHPSCQIRVLWLWNCDITTAGCRDLCRVLRAKESLKELSLAGNALGDEGARLLCESLLEPACQLQSLWVKSCSFTAASCQHFSSMLTRNTCLVELQLSNNKLGDCGVQQLCQGLSQPGAALQVLWLGDCDVGHSGCASLASVLLVNRSLRELDLSNNCMGEEGILRLMESVEQPGCVLEQLVLYDIYWSEEMDNSLRALEERKPSLRVIF

SEQ ID NO: 341 - DNA, 1404 bp, synthetic construct
  misc_feature 1..1404: note = Variant of RNase inhibitor
  source 1..1404: mol_type = other DNA
atgcaccatcatcatcatcatggcggtagcggcaccatgtctctggatattcagtgtcaacaattgtcagatgcgcgttggacggaactgttaccgcttctgcaacagagcgaagtggtgcgcctggatgactgcggcctcactgagatgcgctgcaaagacatcagtagtgcactgcaagccaacccatcgttgaccgaattaagcctgtgtacaaatgagctgggtgatgctggagttcatttagtcctgcagggcttgcagtctcctacctgcaagattgaaaaactgtccctccagaactgttgtctgacgaagactggttgcggtgtattaggcgacatgcttcgttcaatgcccaccctgcgcgaactgtatctgaatgataacccgttgggcgatgcgggcctccagctgctttgctccgggctgttagacccgcaatgtcacctggagaaactgcaggtggaatactgcaatctcacagcagcctcgtgcgaaagcttggcgagcgctctgcgtgccaaacgccattttaaagaattagcggtttcgaacaacgaactgggtgaagcaggcgtgcgcgtactttgtcgtgggctggtggatagtgcgtgccaactggaggttctgaaactggaaaattgtggattgacctctgcctcctgcgaggatctttgtagggtggtcgctagcaaaccaagcctccaggaattggaccttggcatgaacaaattaggtgaccaaggcatcgcaacgttatgcccgaccctgcttcacccttcatgccagattcgtgttttgtggctctggaactgtgatatcaccaccgccggctgccgcgacctctgtcgtgtattacgcgcgaaggaatccctcaaagagctgagtcttgcgggtaatgccttgggagatgaaggcgcacgtctcttgtgcgaatcgttattagaaccggcgtgccagctccagagcctttgggtgaaaagctgttctttcactgctgcttcatgccagcattttagttcgatgttgacgcgcaacacgtgtcttgtcgagctccaattgagcaataataaattaggtgattgtggcgtgcagcagctttgccaagggttatctcaaccaggtgccgccctccaggttttgtggttgggcgactgtgatgtaggtcatagtggctgtgcaagcttagcttccgtgttgcttgtcaaccgttccttacgcgaactcgaccttagtaacaactgcatgggcgaagaagggattctccgtttgatggagagcgttgaacaaccgggatgcgtgcttgaacagttggtcctctatgacatctactggtcggaggagatggataattctttacgtgccttagaagagcgcaaaccgtcattgcgcgtgattttc

SEQ ID NO: 342 - protein, 468 aa, synthetic construct
  REGION 1..468: note = Variant of RNase inhibitor
MHHHHHHGGSGTMSLDIQCQQLSDARWTELLPLLQQSEVVRLDDCGLTEMRCKDISSALQANPSLTELSLCTNELGDAGVHLVLQGLQSPTCKIEKLSLQNCCLTKTGCGVLGDMLRSMPTLRELYLNDNPLGDAGLQLLCSGLLDPQCHLEKLQVEYCNLTAASCESLASALRAKRHFKELAVSNNELGEAGVRVLCRGLVDSACQLEVLKLENCGLTSASCEDLCRVVASKPSLQELDLGMNKLGDQGIATLCPTLLHPSCQIRVLWLWNCDITTAGCRDLCRVLRAKESLKELSLAGNALGDEGARLLCESLLEPACQLQSLWVKSCSFTAASCQHFSSMLTRNTCLVELQLSNNKLGDCGVQQLCQGLSQPGAALQVLWLGDCDVGHSGCASLASVLLVNRSLRELDLSNNCMGEEGILRLMESVEQPGCVLEQLVLYDIYWSEEMDNSLRALEERKPSLRVIF

SEQ ID NO: 343 - DNA, 1404 bp, synthetic construct
  misc_feature 1..1404: note = Variant of RNase inhibitor
  source 1..1404: mol_type = other DNA
atgcaccatcatcatcatcatggcggtagcggcaagatgtctctggatattcagtgtcaacaattgtcagatgcgcgttggacggaactgttaccgcttctgcaacagagcgaagtggtgcgcctggatgactgcggcctcactgagatgcgctgcaaagacatcagtagtgcactgcaagccaacccatcgttgaccgaattaagcctgtgtacaaatgagctgggtgatgctggagttcatttagtcctgcagggcttgcagtctcctacctgcaagattgaaaaactgtccctccagaactgttgtctgacgaagactggttgcggtgtattaggcgacatgcttcgttcaatgcccaccctgcgcgaactgtatctgaatgataacccgttgggcgatgcgggcctccagctgctttgctccgggctgttagacccgcaatgtcacctggagaaactgcaggtggaatactgcaatctcacagcagcctcgtgcgaaagcttggcgagcgctctgcgtgccaaacgccattttaaagaattagcggtttcgaacaacgaactgggtgaagcaggcgtgcgcgtactttgtcgtgggctggtggatagtgcgtgccaactggaggttctgaaactggaaaattgtggattgacctctgcctcctgcgaggatctttgtggtgtggtcgctagcaaaccaagcctccaggaattggaccttggcatgaacaaattaggtgaccaaggcatcgcaacgttatgcccgaccctgcttcacccttcatgccagattcgtgttttgtggctctggaactgtgatatcaccaccgccggctgccgcgacctctgtcgtgtattacgcgcgaaggaatccctcaaagagctgagtcttgcgggtaatgccttgggagatgaaggcgcacgtctcttgtgcgaatcgttattagaaccggcgtgccagctccagagcctttgggtgaaaagctgttctttcactgctgcttcatgccagcattttagttcgatgttgacgcgcaacacgtgtcttgtcgagctccaattgagcaataataaattaggtgattgtggcgtgcagcagctttgccaagggttatctcaaccaggtgccgccctccaggttttgtggttgggcgactgtgatgtaggtcatagtggctgtgcaagcttagcttccgtgttgcttgtcaaccgttccttacgcgaactcgaccttagtaacaactgcatgggcgaagaagggattctccgtttgatggagagcgttgaacaaccgggatgcgtgcttgaacagttggtcctctatgacatctactggtcggaggagatggataattctttacgtgccttagaagagcgcaaaccgtcattgcgcgtgattttc

SEQ ID NO: 344 - protein, 468 aa, synthetic construct
  REGION 1..468: note = Variant of RNase inhibitor
MHHHHHHGGSGKMSLDIQCQQLSDARWTELLPLLQQSEVVRLDDCGLTEMRCKDISSALQANPSLTELSLCTNELGDAGVHLVLQGLQSPTCKIEKLSLQNCCLTKTGCGVLGDMLRSMPTLRELYLNDNPLGDAGLQLLCSGLLDPQCHLEKLQVEYCNLTAASCESLASALRAKRHFKELAVSNNELGEAGVRVLCRGLVDSACQLEVLKLENCGLTSASCEDLCGVVASKPSLQELDLGMNKLGDQGIATLCPTLLHPSCQIRVLWLWNCDITTAGCRDLCRVLRAKESLKELSLAGNALGDEGARLLCESLLEPACQLQSLWVKSCSFTAASCQHFSSMLTRNTCLVELQLSNNKLGDCGVQQLCQGLSQPGAALQVLWLGDCDVGHSGCASLASVLLVNRSLRELDLSNNCMGEEGILRLMESVEQPGCVLEQLVLYDIYWSEEMDNSLRALEERKPSLRVIF

SEQ ID NO: 345 - DNA, 1404 bp, synthetic construct
  misc_feature 1..1404: note = Variant of RNase inhibitor
  source 1..1404: mol_type = other DNA
atgcaccatcatcatcatcatggcggtagcggcaccatgtctctggatattcagtgtcaacaattgtcagatgcgcgttggacggaactgttaccgcttctgcaacagagcgaagtggtgcgcctggatgactgcggcctcactgagatgcgctgcaaagacatcagtagtgcactgcaagccaacccatcgttgaccgaattaagcctgtgtacaaatgagctgggtgatgctggagttcatttagtcctgcagggcttgcagtctcctacctgcaagattgaaaaactgtccctccagaactgttgtctgacgaagactggttgcggtgtattaggcgacatgcttcgttcaatgcccaccctgcgcgaactgtatctgaatgataacccgttgggcgatgcgggcctccagctgctttgctccgggctgttagacccgcaatgtcacctggagaaactgcaggtggaatactgcaatctcacagcagcctcgtgcgaaagcttggcgagcgctattcgtgccaaacgccattttaaagaattagcggtttcgaacaacgaactgggtgaagcaggcgtgcgcgtactttgtcgtgggctggtggatagtgcgtgccaactggaggttctgaaactggaaaattgtggattgacctctgcctcctgcgaggatctttgtggtgtggtcgctagcaaaccaagcctccaggaattggaccttggcatgaacaaattaggtgaccaaggcatcgcaacgttatgcccgaccctgcttcacccttcatgccagattcgtgttttgtggctctggaactgtgatatcaccaccgccggctgccgcgacctctgtcgtgtattacgcgcgaaggaatccctcaaagagctgagtcttgcgggtaatgccttgggagatgaaggcgcacgtctcttgtgcgaatcgttattagaaccggcgtgccagctccagagcctttgggtgaaaagctgttctttcactgctgcttcatgccagcattttagttcgatgttgacgcgcaacacgtgtcttgtcgagctccaattgagcaataataaattaggtgattgtggcgtgcagcagctttgccaagggttatctcaaccaggtgccgccctccaggttttgtggttgggcgactgtgatgtaggtcatagtggctgtgcaagcttagcttccgtgttgcttgtcaaccgttccttacgcgaactcgaccttagtaacaactgcatgggcgaagaagggattctccgtttgatggagagcgttgaacaaccgggatgcgtgcttgaacagttggtcctctatgacatctactggtcggaggagatggataattctttacgtgccttagaagagcgcaaaccgtcattgcgcgtgattttc

SEQ ID NO: 346 - protein, 468 aa, synthetic construct
  REGION 1..468: note = Variant of RNase inhibitor
MHHHHHHGGSGTMSLDIQCQQLSDARWTELLPLLQQSEVVRLDDCGLTEMRCKDISSALQANPSLTELSLCTNELGDAGVHLVLQGLQSPTCKIEKLSLQNCCLTKTGCGVLGDMLRSMPTLRELYLNDNPLGDAGLQLLCSGLLDPQCHLEKLQVEYCNLTAASCESLASAIRAKRHFKELAVSNNELGEAGVRVLCRGLVDSACQLEVLKLENCGLTSASCEDLCGVVASKPSLQELDLGMNKLGDQGIATLCPTLLHPSCQIRVLWLWNCDITTAGCRDLCRVLRAKESLKELSLAGNALGDEGARLLCESLLEPACQLQSLWVKSCSFTAASCQHFSSMLTRNTCLVELQLSNNKLGDCGVQQLCQGLSQPGAALQVLWLGDCDVGHSGCASLASVLLVNRSLRELDLSNNCMGEEGILRLMESVEQPGCVLEQLVLYDIYWSEEMDNSLRALEERKPSLRVIF

SEQ ID NO: 347 - DNA, 1404 bp, synthetic construct
  misc_feature 1..1404: note = Variant of RNase inhibitor
  source 1..1404: mol_type = other DNA
atgcaccatcatcatcatcatggcggtagcggcaccatgtctctggatattcagtgtcaacaattgtcagatgcgcgttggacggaactgttaccgcttctgcaacagagctgtgtggtgcgcctggatgactgcggcctcactgagatgcgctgcaaagacatcagtagtgcactgcaagccaacccatcgttgaccgaattaagcctgtgtacaaatgagctgggtgatgctggagttcatttagtcctgcagggcttgcagtctcctacctgcaagattgaaaaactgtccctccagaactgttgtctgacgaagactggttgcggtgtattaggcgacatgcttcgttcaatgcccaccctgcgcgaactgtatctgaatgataacccgttgggcgatgcgggcctccagctgctttgctccgggctgttagacccgcaatgtcacctggagaaactgcaggtggaatactgcaatctcacagcagcctcgtgcgaaagcttggcgagcgctctgcgtgccaaacgccattttaaagaattagcggtttcgaacaacgaactgggtgaagcaggcgtgcgcgtactttgtcgtgggctggtggatagtgcgtgccaactggaggttctgaaactggaaaattgtggattgacctctgcctcctgcgaggatctttgtggtgtggtcgctagcaaaccaagcctccgggaattggaccttggcatgaacaaattaggtgaccaaggcatcgcaacgttatgcccgaccctgcttcacccttcatgccagattcgtgttttgtggctctggaactgtgatatcaccaccgccggctgccgcgacctctgtcgtgtattacgcgcgaaggaatccctcaaagagctgagtcttgcgggtaatgccttgggagatgaaggcgcacgtctcttgtgcgaatcgttattagaaccggcgtgccagctccagagcctttgggtgaaaagctgttctttcactgctgcttcatgccagcattttagttcgatgttgacgcgcaacacgtgtcttgtcgagctccaattgagcaataataaattaggtgattgtggcgtgcagcagctttgccaagggttatctcaaccaggtgccgccctccaggttttgtggttgggcgactgtgatgtaggtcatagtggctgtgcaagcttagcttccgtgttgcttgtcaaccgttccttacgcgaactcgaccttagtaacaactgcatgggcgaagaagggattctccgtttgatggagagcgttgaacaaccgggatgcgtgcttgaacagttggtcctctatgacatctactggtcggaggagatggataattctttacgtgccttagaagagcgcaaaccgtcattgcgcgtgattttc

SEQ ID NO: 348 - protein, 468 aa, synthetic construct
  REGION 1..468: note = Variant of RNase inhibitor
MHHHHHHGGSGTMSLDIQCQQLSDARWTELLPLLQQSCVVRLDDCGLTEMRCKDISSALQANPSLTELSLCTNELGDAGVHLVLQGLQSPTCKIEKLSLQNCCLTKTGCGVLGDMLRSMPTLRELYLNDNPLGDAGLQLLCSGLLDPQCHLEKLQVEYCNLTAASCESLASALRAKRHFKELAVSNNELGEAGVRVLCRGLVDSACQLEVLKLENCGLTSASCEDLCGVVASKPSLRELDLGMNKLGDQGIATLCPTLLHPSCQIRVLWLWNCDITTAGCRDLCRVLRAKESLKELSLAGNALGDEGARLLCESLLEPACQLQSLWVKSCSFTAASCQHFSSMLTRNTCLVELQLSNNKLGDCGVQQLCQGLSQPGAALQVLWLGDCDVGHSGCASLASVLLVNRSLRELDLSNNCMGEEGILRLMESVEQPGCVLEQLVLYDIYWSEEMDNSLRALEERKPSLRVIF

SEQ ID NO: 349 - DNA, 1404 bp, synthetic construct
  misc_feature 1..1404: note = Variant of RNase inhibitor
  source 1..1404: mol_type = other DNA
atgcaccatcatcatcatcatggcggtagcggcaccatgtctctggatattcagtgtcaacaattgtcagatgcgcgttggacggaactgttaccgcttctgcaacagagcgaagtgattcgcctggatgactgcggcctcactgagatgcgctgcaaagacatcagtagtgcactgcaagccaacccatcgttgaccgaattaagcctgtgtacaaatgagctgggtgatgctggagttcatttagtcctgcagggcttgcagtctcctacctgcaagattgaaaaactgtccctccagaactgttgtctgacgaagactggttgcggtgtattaggcgacatgcttcgttcaatgcccaccctgcgcgaactgtatctgaatgataacccgttgggcgatgcgggcctccagctgctttgctccgggctgttagacccgcaatgtcacctggagaaactgcaggtggaatactgcaatctcacagcagcctcgtgcgaaagcttggcgagcgctctgcgtgccaaacgccattttaaagaattagcggtttcgaacaacgaactgggtgaagcaggcgtgcgcgtactttgtcgtgggctggtggatagtgcgtgccaactggaggttctgaaactggaaaattgtggattgacctctgcctcctgcgaggatctttgtggtgtggtcgctagcaaaccaagcctccaggaattggaccttggcatgaacaaattaggtgaccaaggcatcgcaacgttatgcccgaccctgcttcacccttcatgccagattcgtgttttgtggctctggaactgtgatatcaccaccgccggctgccgcgacctctgtcgtgtattacgcgcgaaggaatccctcaaagagctgagtcttgcgggtaatgccttgggagatgaaggcgcacgtctcttgtgcgaatcgttattagaaccggcgtgccagctccagagcctttgggtgaaaagctgttctttcactgctgcttcatgccagcattttagttcgatgttgacgcgcaacacgtgtcttgtcgagctccaattgagcaataataaattaggtgattgtggcgtgcagcagctttgccaagggttatctcaaccaggtgccgccctccaggttttgtggttgggcgactgtgatgtaggtcatagtggctgtgcaagcttagcttccgtgttgcttgtcaaccgttccttacgcgaactcgaccttagtaacaactgcatgggcgaagaagggattctccgtttgatggagagcgttgaacaaccgggatgcgtgcttgaacagttggtcctctatgacatctactggtcggaggagatggataattctttacgtgccttagaagagcgcaaaccgtcattgcgcgtgattttc

SEQ ID NO: 350 - protein, 468 aa, synthetic construct
  REGION 1..468: note = Variant of RNase inhibitor
MHHHHHHGGSGTMSLDIQCQQLSDARWTELLPLLQQSEVIRLDDCGLTEMRCKDISSALQANPSLTELSLCTNELGDAGVHLVLQGLQSPTCKIEKLSLQNCCLTKTGCGVLGDMLRSMPTLRELYLNDNPLGDAGLQLLCSGLLDPQCHLEKLQVEYCNLTAASCESLASALRAKRHFKELAVSNNELGEAGVRVLCRGLVDSACQLEVLKLENCGLTSASCEDLCGVVASKPSLQELDLGMNKLGDQGIATLCPTLLHPSCQIRVLWLWNCDITTAGCRDLCRVLRAKESLKELSLAGNALGDEGARLLCESLLEPACQLQSLWVKSCSFTAASCQHFSSMLTRNTCLVELQLSNNKLGDCGVQQLCQGLSQPGAALQVLWLGDCDVGHSGCASLASVLLVNRSLRELDLSNNCMGEEGILRLMESVEQPGCVLEQLVLYDIYWSEEMDNSLRALEERKPSLRVIF

SEQ ID NO: 351 - DNA, 1404 bp, synthetic construct
  misc_feature 1..1404: note = Variant of RNase inhibitor
  source 1..1404: mol_type = other DNA
atgcaccatcatcatcatcatggcggtagcggcaccatgtctctggatattcagtgtcaacaattgtcagatgcgcgttggacggaactgttaccgcttctgcaacagagccgggtggtgcgcctggatgactgcggcctcactgagatgcgctgcaaagacatcagtagtgcactgcaagccaacccatcgttgaccgaattaagcctgtgtacaaatgagctgggtgatgctggagttcatttagtcctgcagggcttgcagtctcctacctgcaagattgaaaaactgtccctccagaactgttgtctgacgaagactggttgcggtgtattaggcgacatgcttcgttcaatgcccaccctgcgcgaactgtatctgaatgataacccgttgggcgatgcgggcctccagctgctttgctccgggctgttagacccgcaatgtcacctggagaaactgcaggtggaatactgcaatctcacagcagcctcgtgcgaaagcttggcgagcgctctgcgtgccaaacgccattttaaagaattagcggtttcgaacaacgaactgggtgaagcaggcgtgcgcgtactttgtcgtgggctggtggatagtgcgtgccaactggaggttctgaaactggaaaattgtggattgacctctgcctcctgcgaggatctttgtggtgtggtcgctagcaaaccaagcctccaggaattggaccttggcatgaacaaattaggtgaccaaggcatcgcaacgttatgcccgaccctgcttcacccttcatgccagattcgtgttttgtggctctggaactgtgatatcaccaccgccggctgccgcgacctctgtcgtgtattacgcgcgaaggaatccctcaaagagctgagtcttgcgggtaatgccttgggagatgaaggcgcacgtctcttgtgcgaatcgttattagaaccggcgtgccagctccagagcctttgggtgaaaagctgttctttcactgctgcttcatgccagcattttagttcgatgttgacgcgcaacacgtgtcttgtcgagctccaattgagcaataataaattaggtgattgtggcgtgcagcagctttgccaagggttatctcaaccaggtgccgccctccaggttttgtggttgggcgactgtgatgtaggtcatagtggctgtgcaagcttagcttccgtgttgcttgtcaaccgttccttacgcgaactcgaccttagtaacaactgcatgggcgaagaagggattctccgtttgatggagagcgttgaacaaccgggatgcgtgcttgaacagttggtcctctatgacatctactggtcggaggagatggataattctttacgtgccttagaagagcgcaaaccgtcattgcgcgtgattttc

SEQ ID NO: 352 - protein, 468 aa, synthetic construct
  REGION 1..468: note = Variant of RNase inhibitor
MHHHHHHGGSGTMSLDIQCQQLSDARWTELLPLLQQSRVVRLDDCGLTEMRCKDISSALQANPSLTELSLCTNELGDAGVHLVLQGLQSPTCKIEKLSLQNCCLTKTGCGVLGDMLRSMPTLRELYLNDNPLGDAGLQLLCSGLLDPQCHLEKLQVEYCNLTAASCESLASALRAKRHFKELAVSNNELGEAGVRVLCRGLVDSACQLEVLKLENCGLTSASCEDLCGVVASKPSLQELDLGMNKLGDQGIATLCPTLLHPSCQIRVLWLWNCDITTAGCRDLCRVLRAKESLKELSLAGNALGDEGARLLCESLLEPACQLQSLWVKSCSFTAASCQHFSSMLTRNTCLVELQLSNNKLGDCGVQQLCQGLSQPGAALQVLWLGDCDVGHSGCASLASVLLVNRSLRELDLSNNCMGEEGILRLMESVEQPGCVLEQLVLYDIYWSEEMDNSLRALEERKPSLRVIF

SEQ ID NO: 353 - DNA, 1404 bp, synthetic construct
  misc_feature 1..1404: note = Variant of RNase inhibitor
  source 1..1404: mol_type = other DNA
atgcaccatcatcatcatcatggcggtagcggcacgacgtctctggatattcagtgtcaacaattgtcagatgcgcgttggacggaactgttaccgcttctgcaacagagcgaagtggtgcgcctggatgactgcggcctcactgagatgcgctgcaaagacatcagtagtgcactgcaagccaacccatcgttgaccgaattaagcctgtgtacaaatgagctgggtgatgctggagttcatttagtcctgcagggcttgcagtctcctacctgcaagattgaaaaactgtccctccagaactgttgtctgacgaagactggttgcggtgtattaggcgacatgcttcgttcaatgcccaccctgcgcgaactgtatctgaatgataacccgttgggcgatgcgggcctccagctgctttgctccgggctgatggacccgcaatgtcacctggagaaactgcaggtggaatactgcaatctcacagcagcctcgtgcgaaagcttggcgagcgctctgcgtgccaaacgccattttaaagaattagcggtttcgaacaacgaactgggtgaagcaggcgtgcgcgtactttgtcgtgggctggtggatagtgcgtgccaactggaggttctgaaactggaaaattgtggattgacctctgcctcctgcgaggatctttgtgcggtggtcgctagcaaaccaagcctccaggaattggaccttggcatgaacaaattaggtgaccaaggcatcgcaacgttatgcccgaccctgcttcacccttcatgccagattcgtgttttgtggctctggaactgtgatatcaccaccgccggctgccgcgacctctgtcgtgtattacgcgcgaagccgtccctcaaagagctgagtcttgcgggtaatgccttgggagatgaaggcgcacgtctcttgtgcgaatcgttattagaaccggcgtgccagctcgaaagcctttgggtgaaaagctgttctttcactgctgcttcatgccagcattttagttcgatgttgacgcgcaacacgtgtcttcgcgagctccaattgagcaataataaattaggtgattgtggcgtgcagcagctttgccaagggttatctcaaccaggtgcggccctccaggttttgtggttgggcgactgtgatgtaggtcatagtggctgtgcaagcttagcttccgtgttgcttgtcaaccgttccttacgcgaactcgaccttagtaacaactgcatgggcgaagaagggattctccgtttgatggagagcgttgaacaaccgggatgcgtgcttgaacagttggtcctctatgacatctactggtcggaggagatggatcgttcgttacgtgccttagaagagcgcaaaccgtcattgcgcgtgattttc

SEQ ID NO: 354 - protein, 468 aa, synthetic construct
  REGION 1..468: note = Variant of RNase inhibitor
MHHHHHHGGSGTTSLDIQCQQLSDARWTELLPLLQQSEVVRLDDCGLTEMRCKDISSALQANPSLTELSLCTNELGDAGVHLVLQGLQSPTCKIEKLSLQNCCLTKTGCGVLGDMLRSMPTLRELYLNDNPLGDAGLQLLCSGLMDPQCHLEKLQVEYCNLTAASCESLASALRAKRHFKELAVSNNELGEAGVRVLCRGLVDSACQLEVLKLENCGLTSASCEDLCAVVASKPSLQELDLGMNKLGDQGIATLCPTLLHPSCQIRVLWLWNCDITTAGCRDLCRVLRAKPSLKELSLAGNALGDEGARLLCESLLEPACQLESLWVKSCSFTAASCQHFSSMLTRNTCLRELQLSNNKLGDCGVQQLCQGLSQPGAALQVLWLGDCDVGHSGCASLASVLLVNRSLRELDLSNNCMGEEGILRLMESVEQPGCVLEQLVLYDIYWSEEMDRSLRALEERKPSLRVIF

SEQ ID NO: 355 - DNA, 1404 bp, synthetic construct
  misc_feature 1..1404: note = Variant of RNase inhibitor
  source 1..1404: mol_type = other DNA
atgcaccatcatcatcatcatggcggtagcggcaccatgtctctggatattcagtgtcaacaattgtcagatgcgcgttggacggaactgttaccgcttctgcaacagagcgaagtggtgcgcctggatgactgcggcctcactgagatgcgctgcaaagacatcagtagtgcactgcaagccaacccatcgttgaccgaattaagcctgtgtacaaatgagctgggtgatgctggagttcatttagtcctgcagggcttgcagtctcctacctgcaagattgaaaaactgtccctccagaactgttgtctgacgaagactggttgcggtgtattaggcgacatgcttcgttcaatgcccaccctgcgcgaactgtatctgaatgataacccgttgggcgatgcgggcctccagctgctttgctccgggctgttagacccgcaatgtcacctggagaaactgcaggtggaatactgcaatctcacagcagcctcgtgcgaaagcttggcgagcgctctgcgtgccaaacgccattttaaagaattagcggtttcgaacaacgaactgggtgaagcaggcgtgcgcgtactttgtcgtgggctggtggatagtgcgtgccaactggaggttctgaaactggaaaattgtggattgacctctgcctcctgcgaggatctttgtggtgtggtcgctagcaaaccaagcctccaggaattggaccttggcatgaacaaattaggtgaccaaggcatcgcaacgttatgcccgaccctgcttcacccttcatgccagattcgtgttttgtggctctggaactgtgatatcaccaccgccggctgccgcgacctctgtcgtgtattacgcgcgaaggaatccctcaaagagctgagtcttgcgggtaatgccttgggagatgaaggcgcacgtctcttgtgcgaatcgttattagaaccggcgtgccagctcgaaagcctttgggtgaaaagctgttctttcactgctgcttcatgccagcattttagttcgatgttgacgcgcaacaagtgtcttgtcgagctccaattgagcaataataaattaggtgattgtggcgtgcagcagctttgccaagggttatctcaaccaggtgcggccctccaggttttgtggttgggcgactgtgatgtaggtcatagtggctgtgcaagcttagcttccgtgttgcttgtcaaccgttccttacgcgaactcgaccttagtaacaactgcatgggcgaagaagggattctccgtttgatggagagcgttgaacaaccgggatgcgtgcttgaacagttggtcctctatgacatctactggtcggaggagatggatcgtcgtttacgtgccttagaagagcgcaaaccgtcattgcgcgtgattttc

SEQ ID NO: 356 - protein, 468 aa, synthetic construct
  REGION 1..468: note = Variant of RNase inhibitor
MHHHHHHGGSGTMSLDIQCQQLSDARWTELLPLLQQSEVVRLDDCGLTEMRCKDISSALQANPSLTELSLCTNELGDAGVHLVLQGLQSPTCKIEKLSLQNCCLTKTGCGVLGDMLRSMPTLRELYLNDNPLGDAGLQLLCSGLLDPQCHLEKLQVEYCNLTAASCESLASALRAKRHFKELAVSNNELGEAGVRVLCRGLVDSACQLEVLKLENCGLTSASCEDLCGVVASKPSLQELDLGMNKLGDQGIATLCPTLLHPSCQIRVLWLWNCDITTAGCRDLCRVLRAKESLKELSLAGNALGDEGARLLCESLLEPACQLESLWVKSCSFTAASCQHFSSMLTRNKCLVELQLSNNKLGDCGVQQLCQGLSQPGAALQVLWLGDCDVGHSGCASLASVLLVNRSLRELDLSNNCMGEEGILRLMESVEQPGCVLEQLVLYDIYWSEEMDRRLRALEERKPSLRVIF

SEQ ID NO: 357 - DNA, 1404 bp, synthetic construct
  misc_feature 1..1404: note = Variant of RNase inhibitor
  source 1..1404: mol_type = other DNA
atgcaccatcatcatcatcatggcggtagcggcaagacgtctctggatattcagtgtcaacaattgtcagatgcgcgttggacggaactgttaccgcttctgcaacagagcgaagtggtgcgcctggatgactgcggcctcactgagatgcgctgcaaagacatcagtagtgcactgcaagccaacccatcgttgaccgaattaagcctgtgtacaaatgagctgggtgatgctggagttcatttagtcctgcagggcttgcagtctcctacctgcaagattgaaaaactgtccctccagaactgttgtctgacgaagactggttgcggtgtattaggcgacatgcttcgttcaatgcccaccctgcgcgaactgtatctgaatgataacccgttgggcgatgcgggcctccagctgctttgctccgggctgctggacccgcaatgtcacctggagaaactgcaggtggaatactgcaatctcacagcagcctcgtgcgaaagcttggcgagcgctctgcgtgccaaacgccattttaaagaattagcggtttcgaacaacgaactgggtgaagcaggcgtgcgcgtactttgtcgtgggctggtggatagtgcgtgccaactggaggttctgaaactggaaaattgtggattgacctctgcctcctgcgaggatctttgtggggtggtcgctagcaaaccaagcctccaggaattggaccttggcatgaacaaattaggtgaccaaggcatcgcaacgttatgcccgaccctgcttcacccttcatgccagattcgtgttttgtggctctggaactgtgatatcaccaccgccggctgccgcgacctctgtcgtgtattacgcgcgaaggagtccctcaaagagctgagtcttgcgggtaatgccttgggagatgaaggcgcacgtctcttgtgcgaatcgttattagaaccggcgtgccagctcgaaagcctttgggtgaaaagctgttctttcactgctgcttcatgccagcattttagttcgatgttgacgcgcaacaagtgtcttgtcgagctccaattgagcaataataaattaggtgattgtggcgtgcagcagctttgccaagggttatctcaaccaggtgcggccctccaggttttgtggttgggcgactgtgatgtaggtcatagtggctgtgcaagcttagcttccgtgttgcttgtcaaccgttccttacgcgaactcgaccttagtaacaactgcatgggcgaagaagggattctccgtttgatggagagcgttgaacaaccgggatgcgtgcttgaacagttggtcctctatgacatctactggtcggaggagatggatcgtcgtttacgtgccttagaagagcgcaaaccgtcattgcgcgtgattttc

SEQ ID NO: 358 - protein, 468 aa, synthetic construct
  REGION 1..468: note = Variant of RNase inhibitor
MHHHHHHGGSGKTSLDIQCQQLSDARWTELLPLLQQSEVVRLDDCGLTEMRCKDISSALQANPSLTELSLCTNELGDAGVHLVLQGLQSPTCKIEKLSLQNCCLTKTGCGVLGDMLRSMPTLRELYLNDNPLGDAGLQLLCSGLLDPQCHLEKLQVEYCNLTAASCESLASALRAKRHFKELAVSNNELGEAGVRVLCRGLVDSACQLEVLKLENCGLTSASCEDLCGVVASKPSLQELDLGMNKLGDQGIATLCPTLLHPSCQIRVLWLWNCDITTAGCRDLCRVLRAKESLKELSLAGNALGDEGARLLCESLLEPACQLESLWVKSCSFTAASCQHFSSMLTRNKCLVELQLSNNKLGDCGVQQLCQGLSQPGAALQVLWLGDCDVGHSGCASLASVLLVNRSLRELDLSNNCMGEEGILRLMESVEQPGCVLEQLVLYDIYWSEEMDRRLRALEERKPSLRVIF

SEQ ID NO: 359 - DNA, 1404 bp, synthetic construct
  misc_feature 1..1404: note = Variant of RNase inhibitor
  source 1..1404: mol_type = other DNA
atgcaccatcatcatcatcatggcggtagcggcacgatgtctctggatattcagtgtcaacaattgtcagatgcgcgttggacggaactgttaccgcttctgcaacagagcgaagtggtgcgcctggatgactgcggcctcactgagatgcgctgcaaagacatcagtagtgcactgcaagccaacccatcgttgaccgaattaagcctgtgtacaaatgagctgggtgatgctggagttcatttagtcctgcagggcttgcagtctcctacctgcaagattgaaaaactgtccctccagaactgttgtctgacgaagactggttgcggtgtattaggcgacatgcttcgttcaatgcccaccctgcgcgaactgtatctgaatgataacccgttgggcgatgcgggcctccagctgctttgctccgggctggtggacccgcaatgtcacctggagaaactgcaggtggaatactgcaatctcacagcagcctcgtgcgaaagcttggcgagcgctctgcgtgccaaacgccattttaaagaattagcggtttcgaacaacgaactgggtgaagcaggcgtgcgcgtactttgtcgtgggctggtggatagtgcgtgccaactggaggttctgaaactggaaaattgtggattgacctctgcctcctgcgaggatctttgtcgtgtggtcgctagcaaaccaagcctccaggaattggaccttggcatgaacaaattaggtgaccaaggcatcgcaacgttatgcccgaccctgcttcacccttcatgccagattcgtgttttgtggctctggaactgtgatatcaccaccgccggctgccgcgacctctgtcgtgtattacgcgcgaagccgtccctcaaagagctgagtcttgcgggtaatgccttgggagatgaaggcgcacgtctcttgtgcgaatcgttattagaaccggcgtgccagctcgaaagcctttgggtgaaaagctgttctttcactgctgcttcatgccagcattttagttcgatgttgacgcgcaacaagtgtcttgttgagctccaattgagcaataataaattaggtgattgtggcgtgcagcagctttgccaagggttatctcaaccaggtgcggccctccaggttttgtggttgggcgactgtgatgtaggtcatagtggctgtgcaagcttagcttccgtgttgcttgtcaaccgttccttacgcgaactcgaccttagtaacaactgcatgggcgaagaagggattctccgtttgatggagagcgttgaacaaccgggatgcgtgcttgaacagttggtcctctatgacatctactggtcggaggagatggatcgtcgtttacgtgccttagaagagcgcaaaccgtcattgcgcgtgattttc

SEQ ID NO: 360 - protein, 468 aa, synthetic construct
  REGION 1..468: note = Variant of RNase inhibitor
MHHHHHHGGSGTMSLDIQCQQLSDARWTELLPLLQQSEVVRLDDCGLTEMRCKDISSALQANPSLTELSLCTNELGDAGVHLVLQGLQSPTCKIEKLSLQNCCLTKTGCGVLGDMLRSMPTLRELYLNDNPLGDAGLQLLCSGLVDPQCHLEKLQVEYCNLTAASCESLASALRAKRHFKELAVSNNELGEAGVRVLCRGLVDSACQLEVLKLENCGLTSASCEDLCRVVASKPSLQELDLGMNKLGDQGIATLCPTLLHPSCQIRVLWLWNCDITTAGCRDLCRVLRAKPSLKELSLAGNALGDEGARLLCESLLEPACQLESLWVKSCSFTAASCQHFSSMLTRNKCLVELQLSNNKLGDCGVQQLCQGLSQPGAALQVLWLGDCDVGHSGCASLASVLLVNRSLRELDLSNNCMGEEGILRLMESVEQPGCVLEQLVLYDIYWSEEMDRRLRALEERKPSLRVIF

SEQ ID NO: 361 - DNA, 1404 bp, synthetic construct
  misc_feature 1..1404: note = Variant of RNase inhibitor
  source 1..1404: mol_type = other DNA
atgcaccatcatcatcatcatggcggtagcggcacgacgtctctggatattcagtgtcaacaattgtcagatgcgcgttggacggaactgttaccgcttctgcaacagagcgaagtggtgcgcctggatgactgcggcctcactgagatgcgctgcaaagacatcagtagtgcactgcaagccaacccatcgttgaccgaattaagcctgtgtacaaatgagctgggtgatgctggagttcatttagtcctgcagggcttgcagtctcctacctgcaagattgaaaaactgtccctccagaactgttgtctgacgaagactggttgcggtgtattaggcgacatgcttcgttcaatgcccaccctgcgcgaactgtatctgaatgataacccgttgggcgatgcgggcctccagctgctttgctccgggctggtggacccgcaatgtcacctggagaaactgcaggtggaatactgcaatctcacagcagcctcgtgcgaaagcttggcgagcgctctgcgtgccaaacgccattttaaagaattagcggtttcgaacaacgaactgggtgaagcaggcgtgcgcgtactttgtcgtgggctggtggatagtgcgtgccaactggaggttctgaaactggaaaattgtggattgacctctgcctcctgcgaggatctttgtggtgtggtcgctagcaaaccaagcctccaggaattggaccttggcatgaacaaattaggtgaccaaggcatcgcaacgttatgcccgaccctgcttcacccttcatgccagattcgtgttttgtggctctggaactgtgatatcaccaccgccggctgccgcgacctctgtcgtgtattacgcgcgaaggagtccctcaaagagctgagtcttgcgggtaatgccttgggagatgaaggcgcacgtctcttgtgcgaatcgttattagaaccggcgtgccagctcgaaagcctttgggtgaaaagctgttctttcactgctgcttcatgccagcattttagttcgatgttgacgcgcaacaagtgtcttgttgagctccaattgagcaataataaattaggtgattgtggcgtgcagcagctttgccaagggttatctcaaccaggtgcggccctccaggttttgtggttgggcgactgtgatgtaggtcatagtggctgtgcaagcttagcttccgtgttgcttgtcaaccgttccttacgcgaactcgaccttagtaacaactgcatgggcgaagaagggattctccgtttgatggagagcgttgaacaaccgggatgcgtgcttgaacagttggtcctctatgacatctactggtcggaggagatggatcgtcgtttacgtgccttagaagagcgcaaaccgtcattgcgcgtgattttc

SEQ ID NO: 362 - protein, 468 aa, synthetic construct
  REGION 1..468: note = Variant of RNase inhibitor
MHHHHHHGGSGTTSLDIQCQQLSDARWTELLPLLQQSEVVRLDDCGLTEMRCKDISSALQANPSLTELSLCTNELGDAGVHLVLQGLQSPTCKIEKLSLQNCCLTKTGCGVLGDMLRSMPTLRELYLNDNPLGDAGLQLLCSGLVDPQCHLEKLQVEYCNLTAASCESLASALRAKRHFKELAVSNNELGEAGVRVLCRGLVDSACQLEVLKLENCGLTSASCEDLCGVVASKPSLQELDLGMNKLGDQGIATLCPTLLHPSCQIRVLWLWNCDITTAGCRDLCRVLRAKESLKELSLAGNALGDEGARLLCESLLEPACQLESLWVKSCSFTAASCQHFSSMLTRNKCLVELQLSNNKLGDCGVQQLCQGLSQPGAALQVLWLGDCDVGHSGCASLASVLLVNRSLRELDLSNNCMGEEGILRLMESVEQPGCVLEQLVLYDIYWSEEMDRRLRALEERKPSLRVIF

SEQ ID NO: 363 - DNA, 1404 bp, synthetic construct
  misc_feature 1..1404: note = Variant of RNase inhibitor
  source 1..1404: mol_type = other DNA
atgcaccatcatcatcatcatggcggtagcggcaccatgtctctggatattcagtgtcaacaattgtcagatgcgcgttggacggaactgttaccgcttctgcaacagagcgaagtggtgcgcctggatgactgcggcctcactgagatgcgctgcaaagacatcagtagtgcactgcaagccaacccatcgttgaccgaattaagcctgtgtacaaatgagctgggtgatgctggagttcatttagtcctgcagggcttgcagtctcctacctgcaagattgaaaaactgtccctccagaactgttgtctgacgaagactggttgcggtgtattaggcgacatgcttcgttcaatgcccaccctgcgcgaactgtatctgaatgataacccgttgggcgatgcgggcctccagctgctttgctccgggctgatggacccgcaatgtcacctggagaaactgcaggtggaatactgcaatctcacagcagcctcgtgcgaaagcttggcgagcgctctgcgtgccaaacgccattttaaagaattagcggtttcgaacaacgaactgggtgaagcaggcgtgcgcgtactttgtcgtgggctggtggatagtgcgtgccaactggaggttctgaaactggaaaattgtggattgacctctgcctcctgcgaggatctttgtcgtgtggtcgctagcaaaccaagcctccaggaattggaccttggcatgaacaaattaggtgaccaaggcatcgcaacgttatgcccgaccctgcttcacccttcatgccagattcgtgttttgtggctctggaactgtgatatcaccaccgccggctgccgcgacctctgtcgtgtattacgcgcgaagccgtccctcaaagagctgagtcttgcgggtaatgccttgggagatgaaggcgcacgtctcttgtgcgaatcgttattagaaccggcgtgccagctcgaaagcctttgggtgaaaagctgttctttcactgctgcttcatgccagcattttagttcgatgttgacgcgcaacaagtgtcttgtcgagctccaattgagcaataataaattaggtgattgtggcgtgcagcagctttgccaagggttatctcaaccaggtgcggccctccaggttttgtggttgggcgactgtgatgtaggtcatagtggctgtgcaagcttagcttccgtgttgcttgtcaaccgttccttacgcgaactcgaccttagtaacaactgcatgggcgaagaagggattctccgtttgatggagagcgttgaacaaccgggatgcgtgcttgaacagttggtcctctatgacatctactggtcggaggagatggatcgtcgtttacgtgccttagaagagcgcaaaccgtcattgcgcgtgattttc

SEQ ID NO: 364 - protein, 468 aa, synthetic construct
  REGION 1..468: note = Variant of RNase inhibitor
MHHHHHHGGSGTMSLDIQCQQLSDARWTELLPLLQQSEVVRLDDCGLTEMRCKDISSALQANPSLTELSLCTNELGDAGVHLVLQGLQSPTCKIEKLSLQNCCLTKTGCGVLGDMLRSMPTLRELYLNDNPLGDAGLQLLCSGLMDPQCHLEKLQVEYCNLTAASCESLASALRAKRHFKELAVSNNELGEAGVRVLCRGLVDSACQLEVLKLENCGLTSASCEDLCRVVASKPSLQELDLGMNKLGDQGIATLCPTLLHPSCQIRVLWLWNCDITTAGCRDLCRVLRAKPSLKELSLAGNALGDEGARLLCESLLEPACQLESLWVKSCSFTAASCQHFSSMLTRNKCLVELQLSNNKLGDCGVQQLCQGLSQPGAALQVLWLGDCDVGHSGCASLASVLLVNRSLRELDLSNNCMGEEGILRLMESVEQPGCVLEQLVLYDIYWSEEMDRRLRALEERKPSLRVIF

SEQ ID NO: 365 - DNA, 1404 bp, synthetic construct
  misc_feature 1..1404: note = Variant of RNase inhibitor
  source 1..1404: mol_type = other DNA
atgcaccatcatcatcatcatggcggtagcggcacgatgtctctggatattcagtgtcaacaattgtcagatgcgcgttggacggaactgttaccgcttctgcaacagagcgaagtggtgcgcctggatgactgcggcctcactgagatgcgctgcaaagacatcagtagtgcactgcaagccaacccatcgttgaccgaattaagcctgtgtacaaatgagctgggtgatgctggagttcatttagtcctgcagggcttgcagtctcctacctgcaagattgaaaaactgtccctccagaactgttgtctgacgaagactggttgcggtgtattaggcgacatgcttcgttcaatgcccaccctgcgcgaactgtatctgaatgataacccgttgggcgatgcgggcctccagctgctttgctccgggctggtggacccgcaatgtcacctggagaaactgcaggtggaatactgcaatctcacagcagcctcgtgcgaaagcttggcgagcgctctgcgtgccaaacgccattttaaagaattagcggtttcgaacaacgaactgggtgaagcaggcgtgcgcgtactttgtcgtgggctggtggatagtgcgtgccaactggaggttctgaaactggaaaattgtggattgacctctgcctcctgcgaggatctttgtggggtggtcgctagcaaaccaagcctccaggaattggaccttggcatgaacaaattaggtgaccaaggcatcgcaacgttatgcccgaccctgcttcacccttcatgccagattcgtgttttgtggctctggaactgtgatatcaccaccgccggctgccgcgacctctgtcgtgtattacgcgcgaagccgtccctcaaagagctgagtcttgcgggtaatgccttgggagatgaaggcgcacgtctcttgtgcgaatcgttattagaaccggcgtgccagctcgaaagcctttgggtgaaaagctgttctttcactgctgcttcatgccagcattttagttcgatgttgacgcgcaacaagtgtcttgttgagctccaattgagcaataataaattaggtgattgtggcgtgcagcagctttgccaagggttatctcaaccaggtgcggccctccaggttttgtggttgggcgactgtgatgtaggtcatagtggctgtgcaagcttagcttccgtgttgcttgtcaaccgttccttacgcgaactcgaccttagtaacaactgcatgggcgaagaagggattctccgtttgatggagagcgttgaacaaccgggatgcgtgcttgaacagttggtcctctatgacatctactggtcggaggagatggatcgtcgtttacgtgccttagaagagcgcaaaccgtcattgcgcgtgattttc

SEQ ID NO: 366 - protein, 468 aa, synthetic construct
  REGION 1..468: note = Variant of RNase inhibitor
MHHHHHHGGSGTMSLDIQCQQLSDARWTELLPLLQQSEVVRLDDCGLTEMRCKDISSALQANPSLTELSLCTNELGDAGVHLVLQGLQSPTCKIEKLSLQNCCLTKTGCGVLGDMLRSMPTLRELYLNDNPLGDAGLQLLCSGLVDPQCHLEKLQVEYCNLTAASCESLASALRAKRHFKELAVSNNELGEAGVRVLCRGLVDSACQLEVLKLENCGLTSASCEDLCGVVASKPSLQELDLGMNKLGDQGIATLCPTLLHPSCQIRVLWLWNCDITTAGCRDLCRVLRAKPSLKELSLAGNALGDEGARLLCESLLEPACQLESLWVKSCSFTAASCQHFSSMLTRNKCLVELQLSNNKLGDCGVQQLCQGLSQPGAALQVLWLGDCDVGHSGCASLASVLLVNRSLRELDLSNNCMGEEGILRLMESVEQPGCVLEQLVLYDIYWSEEMDRRLRALEERKPSLRVIF

SEQ ID NO: 367 - DNA, 1404 bp, synthetic construct
  misc_feature 1..1404: note = Variant of RNase inhibitor
  source 1..1404: mol_type = other DNA
atgcaccatcatcatcatcatggcggtagcggcaccatgtctctggatattcagtgtcaacaattgtcagatgcgcgttggacggaactgttaccgcttctgcaacagagcactgtggtgcgcctggatgactgcggcctcactgagatgcgctgcaaagacatcagtagtgcactgcaagccaacccatcgttgaccgaattaagcctgtgtacaaatgagctgggtgatgctggagttcatttagtcctgcagggcttgcagtctcctacctgcaagattgaaaaactgtccctccagaactgttgtctgacgaagactggttgcggtgtattaggcgacatgcttcgttcaatgcccaccctgcgcgaactgtatctgaatgataacccgttgggcgatgcgggcctccagctgctttgctccgggctggtggacccgcaatgtcacctggagaaactgcaggtggaatactgcaatctcacagcagcctcgtgcgaaagcttggcgagcgctctgcgtgccaaacgccattttaaagaattagcggtttcgaacaacgaactgggtgaagcaggcgtgcgcgtactttgtcgtgggctggtggatagtgcgtgccaactggaggttctgaaactggaaaattgtggattgacctctgcctcctgcgaggatctttgtggggtggtcgctagcaaaccaagcctccaggaattggaccttggcatgaacaaattaggtgaccaaggcatcgcaacgttatgcccgaccctgcttcacccttcatgccagattcgtgttttgtggctctggaactgtgatatcaccaccgccggctgccgcgacctctgtcgtgtattacgcgcgaaggaatccctcaaagagctgagtcttgcgggtaatgccttgggagatgaaggcgcacgtctcttgtgcgaatcgttattagaaccggcgtgccagctcgaaagcctttgggtgaaaagctgttctttcactgctgcttcatgccagcattttagttcgatgttgacgcgcaacaagtgtcttgtcgagctccaattgagcaataataaattaggtgattgtggcgtgcagcagctttgccaagggttatctcaaccaggtgcggccctccaggttttgtggttgggcgactgtgatgtaggtcatagtggctgtgcaagcttagcttccgtgttgcttgtcaaccgttccttacgcgaactcgaccttagtaacaactgcatgggcgaagaagggattctccgtttgatggagagcgttgaacaaccgggatgcgtgcttgaacagttggtcctctatgacatctactggtcggaggagatggatcgtcgtttacgtgccttagaagagcgcaaaccgtcattgcgcgtgattttc

SEQ ID NO: 368 - protein, 468 aa, synthetic construct
  REGION 1..468: note = Variant of RNase inhibitor
MHHHHHHGGSGTMSLDIQCQQLSDARWTELLPLLQQSTVVRLDDCGLTEMRCKDISSALQANPSLTELSLCTNELGDAGVHLVLQGLQSPTCKIEKLSLQNCCLTKTGCGVLGDMLRSMPTLRELYLNDNPLGDAGLQLLCSGLVDPQCHLEKLQVEYCNLTAASCESLASALRAKRHFKELAVSNNELGEAGVRVLCRGLVDSACQLEVLKLENCGLTSASCEDLCGVVASKPSLQELDLGMNKLGDQGIATLCPTLLHPSCQIRVLWLWNCDITTAGCRDLCRVLRAKESLKELSLAGNALGDEGARLLCESLLEPACQLESLWVKSCSFTAASCQHFSSMLTRNKCLVELQLSNNKLGDCGVQQLCQGLSQPGAALQVLWLGDCDVGHSGCASLASVLLVNRSLRELDLSNNCMGEEGILRLMESVEQPGCVLEQLVLYDIYWSEEMDRRLRALEERKPSLRVIF

SEQ ID NO: 369 - DNA, 1404 bp, synthetic construct
  misc_feature 1..1404: note = Variant of RNase inhibitor
  source 1..1404: mol_type = other DNA
atgcaccatcatcatcatcatggcggtagcggcaagatgtctctggatattcagtgtcaacaattgtcagatgcgcgttggacggaactgttaccgcttctgcaacagagcgaagtggtgcgcctggatgactgcggcctcactgagatgcgctgcaaagacatcagtagtgcactgcaagccaacccatcgttgaccgaattaagcctgtgtacaaatgagctgggtgatgctggagttcatttagtcctgcagggcttgcagtctcctacctgcaagattgaaaaactgtccctccagaactgttgtctgacgaagactggttgcggtgtattaggcgacatgcttcgttcaatgcccaccctgcgcgaactgtatctgaatgataacccgttgggcgatgcgggcctccagctgctttgctccgggctgatggacccgcaatgtcacctggagaaactgcaggtggaatactgcaatctcacagcagcctcgtgcgaaagcttggcgagcgctctgcgtgccaaacgccattttaaagaattagcggtttcgaacaacgaactgggtgaagcaggcgtgcgcgtactttgtcgtgggctggtggatagtgcgtgccaactggaggttctgaaactggaaaattgtggattgacctctgcctcctgcgaggatctttgtggggtggtcgctagcaaaccaagcctccaggaattggaccttggcatgaacaaattaggtgaccaaggcatcgcaacgttatgcccgaccctgcttcacccttcatgccagattcgtgttttgtggctctggaactgtgatatcaccaccgccggctgccgcgacctctgtcgtgtattacgcgcgaaggagtccctcaaagagctgagtcttgcgggtaatgccttgggagatgaaggcgcacgtctcttgtgcgaatcgttattagaaccggcgtgccagctcgaaagcctttgggtgaaaagctgttctttcactgctgcttcatgccagcattttagttcgatgttgacgcgcaacaagtgtcttgtcgagctccaattgagcaataataaattaggtgattgtggcgtgcagcagctttgccaagggttatctcaaccaggtgcggccctccaggttttgtggttgggcgactgtgatgtaggtcatagtggctgtgcaagcttagcttccgtgttgcttgtcaaccgttccttacgcgaactcgaccttagtaacaactgcatgggcgaagaagggattctccgtttgatggagagcgttgaacaaccgggatgcgtgcttgaacagttggtcctctatgacatctactggtcggaggagatggatcgtcgtttacgtgccttagaagagcgcaaaccgtcattgcgcgtgattttc

SEQ ID NO: 370 - protein, 468 aa, synthetic construct
  REGION 1..468: note = Variant of RNase inhibitor
MHHHHHHGGSGKMSLDIQCQQLSDARWTELLPLLQQSEVVRLDDCGLTEMRCKDISSALQANPSLTELSLCTNELGDAGVHLVLQGLQSPTCKIEKLSLQNCCLTKTGCGVLGDMLRSMPTLRELYLNDNPLGDAGLQLLCSGLMDPQCHLEKLQVEYCNLTAASCESLASALRAKRHFKELAVSNNELGEAGVRVLCRGLVDSACQLEVLKLENCGLTSASCEDLCGVVASKPSLQELDLGMNKLGDQGIATLCPTLLHPSCQIRVLWLWNCDITTAGCRDLCRVLRAKESLKELSLAGNALGDEGARLLCESLLEPACQLESLWVKSCSFTAASCQHFSSMLTRNKCLVELQLSNNKLGDCGVQQLCQGLSQPGAALQVLWLGDCDVGHSGCASLASVLLVNRSLRELDLSNNCMGEEGILRLMESVEQPGCVLEQLVLYDIYWSEEMDRRLRALEERKPSLRVIF

SEQ ID NO: 371 - DNA, 1404 bp, synthetic construct
  misc_feature 1..1404: note = Variant of RNase inhibitor
  source 1..1404: mol_type = other DNA
atgcaccatcatcatcatcatggcggtagcggcaccatgtctctggatattcagtgtcaacaattgtcagatgcgcgttggacggaactgttaccgcttctgcaacagagcgaagtggtgcgcctggatgactgcggcctcactgagatgcgctgcaaagacatcagtagtgcactgcaagccaacccatcgttgaccgaattaagcctgtgtacaaatgagctgggtgatgctggagttcatttagtcctgcagggcttgcagtctcctacctgcaagattgaaaaactgtccctccagaactgttgtctgacgaagactggttgcggtgtattaggcgacatgcttcgttcaatgcccaccctgcgcgaactgtatctgaatgataacccgttgggcgatgcgggcctccagctgctttgctccgggctgctggacccgcaatgtcacctggagaaactgcaggtggaatactgcaatctcacagcagcctcgtgcgaaagcttggcgagcgctctgcgtgccaaacgccattttaaagaattagcggtttcgaacaacgaactgggtgaagcaggcgtgcgcgtactttgtcgtgggctggtggatagtgcgtgccaactggaggttctgaaactggaaaattgtggattgacctctgcctcctgcgaggatctttgtggggtggtcgctagcaaaccaagcctccaggaattggaccttggcatgaacaaattaggtgaccaaggcatcgcaacgttatgcccgaccctgcttcacccttcatgccagattcgtgttttgtggctctggaactgtgatatcaccaccgccggctgccgcgacctctgtcgtgtattacgcgcgaaggaatccctcaaagagctgagtcttgcgggtaatgccttgggagatgaaggcgcacgtctcttgtgcgaatcgttattagaaccggcgtgccagctcgaaagcctttgggtgaaaagctgttctttcactgctgcttcatgccagcattttagttcgatgttgacgcgcaacaagtgtcttgttgagctccaattgagcaataataaattaggtgattgtggcgtgcagcagctttgccaagggttatctcaaccaggtgcggccctccaggttttgtggttgggcgactgtgatgtaggtcatagtggctgtgcaagcttagcttccgtgttgcttgtcaaccgttccttacgcgaactcgaccttagtaacaactgcatgggcgaagaagggattctccgtttgatggagagcgttgaacaaccgggatgcgtgcttgaacagttggtcctctatgacatctactggtcggaggagatggatcgtaagttacgtgccttagaagagcgcaaaccgtcattgcgcgtgattttc

SEQ ID NO: 372 - protein, 468 aa, synthetic construct
  REGION 1..468: note = Variant of RNase inhibitor
MHHHHHHGGSGTMSLDIQCQQLSDARWTELLPLLQQSEVVRLDDCGLTEMRCKDISSALQANPSLTELSLCTNELGDAGVHLVLQGLQSPTCKIEKLSLQNCCLTKTGCGVLGDMLRSMPTLRELYLNDNPLGDAGLQLLCSGLLDPQCHLEKLQVEYCNLTAASCESLASALRAKRHFKELAVSNNELGEAGVRVLCRGLVDSACQLEVLKLENCGLTSASCEDLCGVVASKPSLQELDLGMNKLGDQGIATLCPTLLHPSCQIRVLWLWNCDITTAGCRDLCRVLRAKESLKELSLAGNALGDEGARLLCESLLEPACQLESLWVKSCSFTAASCQHFSSMLTRNKCLVELQLSNNKLGDCGVQQLCQGLSQPGAALQVLWLGDCDVGHSGCASLASVLLVNRSLRELDLSNNCMGEEGILRLMESVEQPGCVLEQLVLYDIYWSEEMDRKLRALEERKPSLRVIF

SEQ ID NO: 373 - DNA, 1404 bp, synthetic construct
  misc_feature 1..1404: note = Variant of RNase inhibitor
  source 1..1404: mol_type = other DNA
atgcaccatcatcatcatcatggcggtagcggcacgatgtctctggatattcagtgtcaacaattgtcagatgcgcgttggacggaactgttaccgcttctgcaacagagcactgtggtgcgcctggatgactgcggcctcactgagatgcgctgcaaagacatcagtagtgcactgcaagccaacccatcgttgaccgaattaagcctgtgtacaaatgagctgggtgatgctggagttcatttagtcctgcagggcttgcagtctcctacctgcaagattgaaaaactgtccctccagaactgttgtctgacgaagactggttgcggtgtattaggcgacatgcttcgttcaatgcccaccctgcgcgaactgtatctgaatgataacccgttgggcgatgcgggcctccagctgctttgctccgggctgattgacccgcaatgtcacctggagaaactgcaggtggaatactgcaatctcacagcagcctcgtgcgaaagcttggcgagcgctctgcgtgccaaacgccattttaaagaattagcggtttcgaacaacgaactgggtgaagcaggcgtgcgcgtactttgtcgtgggctggtggatagtgcgtgccaactggaggttctgaaactggaaaattgtggattgacctctgcctcctgcgaggatctttgtgcggtggtcgctagcaaaccaagcctccaggaattggaccttggcatgaacaaattaggtgaccaaggcatcgcaacgttatgcccgaccctgcttcacccttcatgccagattcgtgttttgtggctctggaactgtgatatcaccaccgccggctgccgcgacctctgtcgtgtattacgcgcgaaggagtccctcaaagagctgagtcttgcgggtaatgccttgggagatgaaggcgcacgtctcttgtgcgaatcgttattagaaccggcgtgccagctcgaaagcctttgggtgaaaagctgttctttcactgctgcttcatgccagcattttagttcgatgttgacgcgcaacaagtgtcttgttgagctccaattgagcaataataaattaggtgattgtggcgtgcagcagctttgccaagggttatctcaaccaggtgcggccctccaggttttgtggttgggcgactgtgatgtaggtcatagtggctgtgcaagcttagcttccgtgttgcttgtcaaccgttccttacgcgaactcgaccttagtaacaactgcatgggcgaagaagggattctccgtttgatggagagcgttgaacaaccgggatgcgtgcttgaacagttggtcctctatgacatctactggtcggaggagatggatcgtcgtttacgtgccttagaagagcgcaaaccgtcattgcgcgtgattttc

SEQ ID NO: 374 - protein, 468 aa, synthetic construct
  REGION 1..468: note = Variant of RNase inhibitor
MHHHHHHGGSGTMSLDIQCQQLSDARWTELLPLLQQSTVVRLDDCGLTEMRCKDISSALQANPSLTELSLCTNELGDAGVHLVLQGLQSPTCKIEKLSLQNCCLTKTGCGVLGDMLRSMPTLRELYLNDNPLGDAGLQLLCSGLIDPQCHLEKLQVEYCNLTAASCESLASALRAKRHFKELAVSNNELGEAGVRVLCRGLVDSACQLEVLKLENCGLTSASCEDLCAVVASKPSLQELDLGMNKLGDQGIATLCPTLLHPSCQIRVLWLWNCDITTAGCRDLCRVLRAKESLKELSLAGNALGDEGARLLCESLLEPACQLESLWVKSCSFTAASCQHFSSMLTRNKCLVELQLSNNKLGDCGVQQLCQGLSQPGAALQVLWLGDCDVGHSGCASLASVLLVNRSLRELDLSNNCMGEEGILRLMESVEQPGCVLEQLVLYDIYWSEEMDRRLRALEERKPSLRVIF

SEQ ID NO: 375 - DNA, 1404 bp, synthetic construct
  misc_feature 1..1404: note = Variant of RNase inhibitor
  source 1..1404: mol_type = other DNA
atgcaccatcatcatcatcatggcggtagcggcaccatgtctcgtgatattcagtgtcaacaattgtcagatgcgcgttggcatgaactgttaccgcttctgcaacagagcgaagtggtgcgcctggatgactgcggcctcactgagatgcgctgcaaagacatcagtagtgcactgcaagccaacccatcgttgaccgaattaagcctgtgtacaaatgagctgggtgatgctggagttaccttagtcctgcagggcttgcagtctcctacctgcaagattgaaaaactgtccctccagaactgttgtctgacgaagactggttgcggtgtattaggcgacatgcttcgttcaatgcccaccctgcgcgcgctgtatctgaatgataacccgttgggcgatgcgggcctccagctgctttgctccgggctgttagacccgcaatgtcacctggagaaactgcaggtggaatactgcaatctcacagcagcctcgtgcgaaagcttggcgtcggctctgcgtgccaaacgccattttaaagaattagcggtttcgaacaacgaactgggtgaagcaggcgtgcgcgtactttgtcgtgggctggtggatagtgcgtgccaactggaggttctgaaactggaaaattgtggattgacctcttcgtcctgcgaggatctttgtggtgtggtcgctagcaaaccaagcctccaggaattggaccttggcatgaacaaattaggtgaccaaggcatcgcaacgttatgcccgaccctgcttcacccttcatgccagattcgtgttttgtggctctggaactgtgatatcaccaccgccggctgccgcgacctctgtcaggtattacgcgcgaaggaatccctcaaagagctgagtcttgcgggtaatgccttgggagatgaaggcgcacgtctcttgtgcgaatcgttattaagtccggcgtgccagctcgaaagcctttgggtgaaaagctgttctttcactgctgcttcatgccagcattttagttcgatgttgacgcgcaacaagtgtcttgtcgagctccaattgagcaataataaattaggtgattgtggcgtgcagcagctttgccaagggttatctcaaccaggtgcggccctccaggttttgtggttgggcgactgtgatgtaggtcatagtggctgtgcaagcttagcttccgtgttgcttgtcaaccgttccttacgcgaactcgaccttagtaacaactgcatgggcgaagaagggattctccgtttgatggagagcgttgaacaaccgggatgcgtgcttgaacagttggtcctctatgacatctactggtcggaggagatggatcgttcgttacgtgccttagaagagcgcaaaccgtcattgcgcgtgattttc

SEQ ID NO: 376 - protein, 468 aa, synthetic construct
  REGION 1..468: note = Variant of RNase inhibitor
MHHHHHHGGSGTMSRDIQCQQLSDARWHELLPLLQQSEVVRLDDCGLTEMRCKDISSALQANPSLTELSLCTNELGDAGVTLVLQGLQSPTCKIEKLSLQNCCLTKTGCGVLGDMLRSMPTLRALYLNDNPLGDAGLQLLCSGLLDPQCHLEKLQVEYCNLTAASCESLASALRAKRHFKELAVSNNELGEAGVRVLCRGLVDSACQLEVLKLENCGLTSSSCEDLCGVVASKPSLQELDLGMNKLGDQGIATLCPTLLHPSCQIRVLWLWNCDITTAGCRDLCQVLRAKESLKELSLAGNALGDEGARLLCESLLSPACQLESLWVKSCSFTAASCQHFSSMLTRNKCLVELQLSNNKLGDCGVQQLCQGLSQPGAALQVLWLGDCDVGHSGCASLASVLLVNRSLRELDLSNNCMGEEGILRLMESVEQPGCVLEQLVLYDIYWSEEMDRSLRALEERKPSLRVIF

SEQ ID NO: 377 - DNA, 1404 bp, synthetic construct
  misc_feature 1..1404: note = Variant of RNase inhibitor
  source 1..1404: mol_type = other DNA
atgcaccatcatcatcatcatggcggtagcggcaccatgtctcgtgatattcagtgtcaacaattgtcagatgcgcgttggcatgaactgttaccgcttctgcaacagagcgaagtggtgcgcctggatgactgcggcctcactgagatgcgctgcaaagacatcagtagtgcactgcaagccaacccagttttgaccgaattaagcctgtgtacaaatgagctgggtgatgctggagttcacttagtcctgcagggcttgcagtctcctacctgcaagattgaaaaactgtccctccagaactgttgtctgacgaagactggttgcggtgtattaggcgacatgcttcgttcaatgcccaccctgcgcgagctgtatctgaatgataacccgttgggcgatgcgggcctccagctgctttgctccgggctgttagacccgcaatgtcacctggagaaactgcaggtggaatactgcaatctcacagcagcctcgtgcgaaagcttggcgagcgctctgcgtgccaaacgccattttaaagaattagcggtttcgaacaacgaactgggtgaagcaggcgtgcgcgtactttgtcgtgggctggtggagagtgcgtgccaactggaggttctgaaactggaaaattgtggattgacctcttcgtcctgcgaggatctttgtggtgtggtcgctagcaaaccaagcctccaggaattggaccttggcatgaacaaattaggtgaccaaggcatcgcaacgttatgcccgaccctgcttcacccttcatgccagattcgtgttttgtggctctggaactgtgatatcaccaccgccggctgccgcgacctctgtcaggtattacgcgcgaaggaatccctcaaagagctgagtcttgcgggtaatgccttgggagatgaaggcgcacgtctcttgtgcgaatcgttattaagtccggcgtgccagctcgaaagcctttgggtgaaaagctgttctttcactgctgcttcatgccagcattttagttcgatgttgacgcgcaacaagtgtcttgtcgagctccaattgagcaataataaattaggtgattgtggcgtgcagcagctttgccaagggttatctcaaccaggtgcggccctccaggttttgtggttgggcgactgtgatgtaggtcatagtggctgtgcaagcttagcttccgtgttgcttgtcaaccgttccttacgcgaactcgaccttagtaacaactgcatgggcgaagaagggattctccgtttgatggagagcgttgaacaaccgggatgcgtgcttgaacagttggtcctctatgacatctactggtcggaggagatggatcgttcgttacgtgccttagaagagcgcaaaccgtcattgcgcgtgattttc

SEQ ID NO: 378 - protein, 468 aa, synthetic construct
  REGION 1..468: note = Variant of RNase inhibitor
MHHHHHHGGSGTMSRDIQCQQLSDARWHELLPLLQQSEVVRLDDCGLTEMRCKDISSALQANPVLTELSLCTNELGDAGVHLVLQGLQSPTCKIEKLSLQNCCLTKTGCGVLGDMLRSMPTLRELYLNDNPLGDAGLQLLCSGLLDPQCHLEKLQVEYCNLTAASCESLASALRAKRHFKELAVSNNELGEAGVRVLCRGLVESACQLEVLKLENCGLTSSSCEDLCGVVASKPSLQELDLGMNKLGDQGIATLCPTLLHPSCQIRVLWLWNCDITTAGCRDLCQVLRAKESLKELSLAGNALGDEGARLLCESLLSPACQLESLWVKSCSFTAASCQHFSSMLTRNKCLVELQLSNNKLGDCGVQQLCQGLSQPGAALQVLWLGDCDVGHSGCASLASVLLVNRSLRELDLSNNCMGEEGILRLMESVEQPGCVLEQLVLYDIYWSEEMDRSLRALEERKPSLRVIF

SEQ ID NO: 379 - DNA, 1404 bp, synthetic construct
  misc_feature 1..1404: note = Variant of RNase inhibitor
  source 1..1404: mol_type = other DNA
atgcaccatcatcatcatcatggcggtagcggcaccatgtctcgtgatattcagtgtcaacaattgtcagatgcgcgttggacggaactgttaccgcttctgcaacagagcgaagtggtgcgcctggatgactgcggcctcactgagatgcgctgcaaagacatcagtatggcactgcaagccaacccatcgttgaccgaattaagcctgtgtacaaatgagctgggtgatgctggagttaccttagtcctgcagggcttgcagtctcctacctgcaagattgaaaaactgtccctccagaactgttgtctgacgaagactggttgcggtgtattaggcgacatgcttcgttcaatgcccaccctgcgcgcgctgtatctgaatgataacccgttgggcgatgcgggcctccagctgctttgctccgggctgttagacccgaactgtcacctggagaaactgcaggtggaatactgcaatctcacagcagcctcgtgcgaaagcttggcgagcgctctgcgtgccaaacgccattttaaagaattagcggtttcgaacaacgaactgggtgaagcaggcgtgcgcgtactttgtcgtgggctggtggagagtgcgtgccaactggaggttctgaaactggaaaattgtggattgacctctgcctcctgcgaggatctttgtggtgtggtcgctagcaaaccaagcctccaggaattggaccttggcatgaacaaattaggtgaccaaggcatcgcaacgttatgcccgaccctgcttcacccttcatgccagattcgtgttttgtggctctggaactgtgatatcaccaccgccggctgccgcgacctctgtcgtgtattacgcgcgaaggaatccctcaaagagctgagtcttgcgggtaatgccttgggagatgaaggcgcacgtctcttgtgcgaatcgttattagaaccggcgtgccagctcgaaagcctttgggtgaaaagctgttctttcactgctgcttcatgccagcattttagttcgatgttgacgcgcaacaagtgtcttgtcgagctccaattgagcaataataaattaggtgattgtggcgtgcagcagctttgccaagggttatctcaaccaggtgcggccctccaggttttgtggttgggcgactgtgatgtaggtcatagtggctgtgcaagcttagcttccgtgttgcttgtcaaccgttccttacgcgaactcgaccttagtaacaactgcatgggcgaagaagggattctccgtttgatggagagcgttgaacaaccgggatgcgtgcttgaacagttggtcctctatgacatctactggtcggaggagatggatcgttcgttacgtgccttagaagagcgcaaaccgtcattgcgcgtgattttc

SEQ ID NO: 380 - protein, 468 aa, synthetic construct
  REGION 1..468: note = Variant of RNase inhibitor
MHHHHHHGGSGTMSRDIQCQQLSDARWTELLPLLQQSEVVRLDDCGLTEMRCKDISMALQANPSLTELSLCTNELGDAGVTLVLQGLQSPTCKIEKLSLQNCCLTKTGCGVLGDMLRSMPTLRALYLNDNPLGDAGLQLLCSGLLDPNCHLEKLQVEYCNLTAASCESLASALRAKRHFKELAVSNNELGEAGVRVLCRGLVESACQLEVLKLENCGLTSASCEDLCGVVASKPSLQELDLGMNKLGDQGIATLCPTLLHPSCQIRVLWLWNCDITTAGCRDLCRVLRAKESLKELSLAGNALGDEGARLLCESLLEPACQLESLWVKSCSFTAASCQHFSSMLTRNKCLVELQLSNNKLGDCGVQQLCQGLSQPGAALQVLWLGDCDVGHSGCASLASVLLVNRSLRELDLSNNCMGEEGILRLMESVEQPGCVLEQLVLYDIYWSEEMDRSLRALEERKPSLRVIF

SEQ ID NO: 381 - DNA, 1404 bp, synthetic construct
  misc_feature 1..1404: note = Variant of RNase inhibitor
  source 1..1404: mol_type = other DNA
atgcaccatcatcatcatcatggcggtagcggcaagatgtctctggatattcagtgtcaacaattgtcagatgcgcgttggacggaactgttaccgcttctgcaacagagcgaagtggtgcgcctggatgactgcggcctcactgagatgcgctgcaaagacatcagtagtgcactgcaagccaacccatcgttgaccgaattaagcctgtgtacaaatgagctgggtgatgctggagttcatttagtcctgcagggcttgcagtctcctacctgcaagattgaaaaactgtccctccagaactgttgtctgacgaagactggttgcggtgtattaggcgacatgcttcgttcaatgcccaccctgcgcgaactgtatctgaatgataacccgttgggcgatgcgggcctccagctgctttgctccgggctgctggacccgcaatgtcacctggagaaactgcaggtggaatactgcaatctcacagcagcctcgtgcgaaagcttggcgagcgctctgcgtgccaaacgccattttaaagaattagcggtttcgaacaacgaactgggtgaagcaggcgtgcgcgtactttgtcgtgggctggtggatagtgcgtgccaactggaggttctgaaactggaaaattgtggattgacctctgcctcctgcgaggatctttgtggggtggtcgctagcaaaccaagcctccaggaattggaccttggcatgaacaaattaggtgaccaaggcatcgcaacgttatgcccgaccctgcttcacccttcatgccagattcgtgttttgtggctctggaactgtgatatcaccaccgccggctgccgcgacctctgtcgtgtattacgcgcgaaggagtccctcaaagagctgagtcttgcgggtaatgccttgggagatgaaggcgcacgtctcttgtgcgaatcgttattagaaccggcgtgccagctcgaaagcctttgggtgaaaagctgttctttcactgctgcttcatgccagcattttagttcgatgttgacgcgcaacaagtgtcttgtcgagctccaattgagcaataataaattaggtgattgtggcgtgcagcagctttgccaagggttatctcaaccaggtgcggccctccaggttttgtggttgggcgactgtgatgtaggtcatagtggctgtgcaagcttagcttccgtgttgcttgtcaaccgttccttacgcgaactcgaccttagtaacaactgcatgggcgaagaagggattctccgtttgatggagagcgttgaacaaccgggatgcgtgcttgaacagttggtcctctatgacatctactggtcggaggagatggatcgtaagttacgtgccttagaagagcgcaaaccgtcattgcgcgtgattttc

SEQ ID NO: 382 - protein, 468 aa, synthetic construct
  REGION 1..468: note = Variant of RNase inhibitor
MHHHHHHGGSGKMSLDIQCQQLSDARWTELLPLLQQSEVVRLDDCGLTEMRCKDISSALQANPSLTELSLCTNELGDAGVHLVLQGLQSPTCKIEKLSLQNCCLTKTGCGVLGDMLRSMPTLRELYLNDNPLGDAGLQLLCSGLLDPQCHLEKLQVEYCNLTAASCESLASALRAKRHFKELAVSNNELGEAGVRVLCRGLVDSACQLEVLKLENCGLTSASCEDLCGVVASKPSLQELDLGMNKLGDQGIATLCPTLLHPSCQIRVLWLWNCDITTAGCRDLCRVLRAKESLKELSLAGNALGDEGARLLCESLLEPACQLESLWVKSCSFTAASCQHFSSMLTRNKCLVELQLSNNKLGDCGVQQLCQGLSQPGAALQVLWLGDCDVGHSGCASLASVLLVNRSLRELDLSNNCMGEEGILRLMESVEQPGCVLEQLVLYDIYWSEEMDRKLRALEERKPSLRVIF

SEQ ID NO: 383 - DNA, 1404 bp, synthetic construct
  misc_feature 1..1404: note = Variant of RNase inhibitor
  source 1..1404: mol_type = other DNA
atgcaccatcatcatcatcatggcggtagcggcaccatgtctctggatattcagtgtcaacaattgtcagatgcgcgttggacggaactgttaccgcttctgcaacagagcgaagtggtgcgcctggatgactgcggcctcactgagatgcgctgcaaagacatcgcgacggcactgcaagccaacccagttttgaccgaattaagcctgtgtacaaatgagctgggtgatgctggagttaccttagtcctgcagggcttgcagtctcctaagtgcaagattgaaaaactgtccctccagaactgttgtctgacgaagactggttgcggtgtattaggcgacatgcttcgttcaatgcccaccctgcgcgcgctgtatctgaatgataacccgttgggcgatgcgggcctccagctgctttgctccgggctgttagacccgcaatgtcacctggagaaactgcaggtggaatactgcaatctcacagcagcctcgtgcgaaagcttggcgtcggctctgcgtgccaaacgccattttaaagaattagcggtttcgaacaacgaactgggtgaagcaggcgtgcgcgtactttgtcgtgggctggtggagagtgcgtgccaactggaggttctgaaactggaaaattgtggattgacctctgcctcctgcgaggatctttgtggtgtggtcgctagcaaaccaagcctccaggaattggaccttggcatgaacaaattaggtgaccaaggcatcgcaacgttatgcccgaccctgcttcacccttcatgccagattcgtgttttgtggctctggaactgtgatatcaccaccgccggctgccgcgacctctgtcaggtattacgcgcgaaggaatccctcaaagagctgagtcttgcgggtaatgccttgggagatgaaggcgcacgtctcttgtgcgaatcgttattaagtccggcgtgccagctcgaaagcctttgggtgaaaagctgttctttcactgctgcttcatgccagcattttagttcgatgttgacgcgcaacaagtgtcttgtcgagctccaattgagcaataataaattaggtgattgtggcgtgcagcagctttgccaagggttatctcaaccaggtgcggccctccaggttttgtggttgggcgactgtgatgtaggtcatagtggctgtgcaagcttagcttccgtgttgcttgtcaaccgttccttacgcgaactcgaccttagtaacaactgcatgggcgaagaagggattctccgtttgatggagagcgttgaacaaccgggatgcgtgcttgaacagttggtcctctatgacatctactggtcggaggagatggatcgttcgttacgtgccttagaagagcgcaaaccgtcattgcgcgtgattttc

SEQ ID NO: 384 - protein, 468 aa, synthetic construct
  REGION 1..468: note = Variant of RNase inhibitor
MHHHHHHGGSGTMSLDIQCQQLSDARWTELLPLLQQSEVVRLDDCGLTEMRCKDIATALQANPVLTELSLCTNELGDAGVTLVLQGLQSPKCKIEKLSLQNCCLTKTGCGVLGDMLRSMPTLRALYLNDNPLGDAGLQLLCSGLLDPQCHLEKLQVEYCNLTAASCESLASALRAKRHFKELAVSNNELGEAGVRVLCRGLVESACQLEVLKLENCGLTSASCEDLCGVVASKPSLQELDLGMNKLGDQGIATLCPTLLHPSCQIRVLWLWNCDITTAGCRDLCQVLRAKESLKELSLAGNALGDEGARLLCESLLSPACQLESLWVKSCSFTAASCQHFSSMLTRNKCLVELQLSNNKLGDCGVQQLCQGLSQPGAALQVLWLGDCDVGHSGCASLASVLLVNRSLRELDLSNNCMGEEGILRLMESVEQPGCVLEQLVLYDIYWSEEMDRSLRALEERKPSLRVIF

SEQ ID NO: 385 - DNA, 1404 bp, synthetic construct
  misc_feature 1..1404: note = Variant of RNase inhibitor
  source 1..1404: mol_type = other DNA
atgcaccatcatcatcatcatggcggtagcggcaccatgtctctggatattcagtgtcaacaattgtcagatgcgcgttggacggaactgttaccgcttctgcaacagagcgaagtggtgcgcctggatgactgcggcctcactgagatgcgctgcaaagacatcagtagtgcactgcaagccaacccatcgttgattgaattaagcctgtgtacaaatgagctgggtgatgctggagttcatttagtcctgcagggcttgcagtctgggacctgcaagattgaaaaactgtccctccagaactgttgtctgacgaagactggttgcggtgtattaggcgacatgcttcgttcaatgcccaccctgcgcgaactgtatctgaatgataacccgttgggcgatgcgggcctccagctgctttgccacgggctgttagacccgcaatgtcacctggagaaactgcaggtggaatactgcaatctcacagcagcctcgtgcgaaagcttggcgagcgctctgcgtgccagccgccattttaaagaattagcggtttcgaacaacgaactgggtgaagcaggcgtgcgcgtactttgtcgtgggctggtggatagtccttgccaactggaggttctgaaactggaaaattgtggattgacctctgcctcctgcgaggatctttgtggtgtggtcgctagcaaaccaagcctccaggaattggaccttggcatgaacaaattaggtgaccaaggcatcgcaacgttatgcccgaccctgcttcacccttcatgccagattcgtgttttgtggctctggaactgtgatatcaccaccgccggctgccgcgacctctgtcgtgtattacgcgcgaaggaatccctcaaagagctgagtcttgcgggtaatgccttgggagatgaaggcgcacgtctcttgtgcgaatcgttattagaaccgggttgccagctcgaaagcctttgggtgaaaagctgttctttcactgctgcttcatgccagcattttagttcgatgttgacgcgcaacaagtgtcttgtcgagctccaattgagcaataataaattaggtgattgtggcgtgcagcagctttgccaagggttatctcaaccaggtgcggccctccaggttttgtggttgggcgactgtgatgtaggtcatagtggctgtgcaagcttagcttccgtgttgcttgtcaaccgttccttacgcgaactcgaccttagtaacaactgcatgggcgaagaagggattctccgtttgatggagagcgttgaacaaccgggatgcgtgcttgaacagttggtcctctatgacatctactggtcggaggagatggatcgttcgttacgtgccttagaagagcgcaaaccgtcattgcgcgtgattttc

SEQ ID NO: 386 - protein, 468 aa, synthetic construct
  REGION 1..468: note = Variant of RNase inhibitor
MHHHHHHGGSGTMSLDIQCQQLSDARWTELLPLLQQSEVVRLDDCGLTEMRCKDISSALQANPSLIELSLCTNELGDAGVHLVLQGLQSGTCKIEKLSLQNCCLTKTGCGVLGDMLRSMPTLRELYLNDNPLGDAGLQLLCHGLLDPQCHLEKLQVEYCNLTAASCESLASALRASRHFKELAVSNNELGEAGVRVLCRGLVDSPCQLEVLKLENCGLTSASCEDLCGVVASKPSLQELDLGMNKLGDQGIATLCPTLLHPSCQIRVLWLWNCDITTAGCRDLCRVLRAKESLKELSLAGNALGDEGARLLCESLLEPGCQLESLWVKSCSFTAASCQHFSSMLTRNKCLVELQLSNNKLGDCGVQQLCQGLSQPGAALQVLWLGDCDVGHSGCASLASVLLVNRSLRELDLSNNCMGEEGILRLMESVEQPGCVLEQLVLYDIYWSEEMDRSLRALEERKPSLRVIF

SEQ ID NO: 387 - DNA, 1404 bp, synthetic construct
  misc_feature 1..1404: note = Variant of RNase inhibitor
  source 1..1404: mol_type = other DNA
atgcaccatcatcatcatcatggcggtagcggcaccatgtctctggatattcagtgtcaacaattgtcagatgcgcgttggacggaactgttaccgcttctgcaacagagcgaagtggtgcgcctggatgactgcggcctcactgagatgcgctgcaaagacatcagtagtgcactgcaagccaacccatcgttgaccgaattaagcctgtgtacaaatgagctgggtgatgctggagttcatttagtcctgcagggcttgcagtctcctacctgcaagattgaaaaactgtccctccagaactgttgtctgacgaagactggttgcggtgtattaggcgacatgcttcgttcaatgcccaccctgcgcgaactgtatctgaatgataacccgttgggcgatgcgggcctccagctgctttgctccgggctgttagacccgcaatgtcacctggagaaactgcaggtggaatactgcaatctcacagcagcctcgtgcgaaagcttggcgagcgctctgcgtgccaaacgccattttaaagaattagcggtttcgaacaacgaactgggtgaagcaggcgtgcgcgtactttgtcgtgggctggtggatagtgcgtgccaactggaggttctgaaactggaaaattgtggattgacctctgcctcctgcgaggatctttgtcgtgtggtcgctagcaaaccaagcctccaggaattggaccttggcatgaacaaattaggtgaccaaggcatcgcaacgttatgcccgaccctgcttcacccttcatgccagattcgtgttttgtggctctggaactgtgatatcaccaccgccggctgccgcgacctctgtcgtgtattacgcgcgaaggaatccctcaaagagctgagtcttgcgggtaatgccttgggagatgaaggcgcacgtctcttgtgcgaatcgttattagaaccggcgtgccagctcgaaagcctttgggtgaaaagctgttctttcactgctgcttcatgccagcattttagttcgatgttgacgcgcaacaagtgtcttgtcgagctccaattgagcaataataaattaggtgattgtggcgtgcagcagctttgccaagggttatctcaaccaggtgcggccctccaggttttgtggttgggcgactgtgatgtaggtcatagtggctgtgcaagcttagcttccgtgttgcttgtcaaccgttccttacgcgaactcgaccttagtaacaactgcatgggcgaagaagggattctccgtttgatggagagcgttgaacaaccgggatgcgtgcttgaacagttggtcctctatgacatctactggtcggaggagatggatcgtaagttacgtgccttagaagagcgcaaaccgtcattgcgcgtgattttc

SEQ ID NO: 388 - protein, 468 aa, synthetic construct
  REGION 1..468: note = Variant of RNase inhibitor
MHHHHHHGGSGTMSLDIQCQQLSDARWTELLPLLQQSEVVRLDDCGLTEMRCKDISSALQANPSLTELSLCTNELGDAGVHLVLQGLQSPTCKIEKLSLQNCCLTKTGCGVLGDMLRSMPTLRELYLNDNPLGDAGLQLLCSGLLDPQCHLEKLQVEYCNLTAASCESLASALRAKRHFKELAVSNNELGEAGVRVLCRGLVDSACQLEVLKLENCGLTSASCEDLCRVVASKPSLQELDLGMNKLGDQGIATLCPTLLHPSCQIRVLWLWNCDITTAGCRDLCRVLRAKESLKELSLAGNALGDEGARLLCESLLEPACQLESLWVKSCSFTAASCQHFSSMLTRNKCLVELQLSNNKLGDCGVQQLCQGLSQPGAALQVLWLGDCDVGHSGCASLASVLLVNRSLRELDLSNNCMGEEGILRLMESVEQPGCVLEQLVLYDIYWSEEMDRKLRALEERKPSLRVIF

SEQ ID NO: 389 - DNA, 1404 bp, synthetic construct
  misc_feature 1..1404: note = Variant of RNase inhibitor
  source 1..1404: mol_type = other DNA
atgcaccatcatcatcatcatggcggtagcggcaccatgtctctggatattcagtgtcaacaattgtcagatgcgcgttggacggaactgttaccgcttctgcaacagagcgaagtggtgcgcctggatgactgcggcctcactgagatgcgctgcaaagacatcagtagtgcactgcaagccaacccatcgttgaccgaattaagcctgtgtacaaatgagctgggtgatgctggagttcatttagtcctgcagggcttgcagtctcctacctgcaagattgaaaaactgtccctccagaactgttgtctgacgaagactggttgcggtgtattaggcgacatgcttcgttcaatgcccaccctgcgcgaactgtatctgaatgataacccgttgggcgatgcgggcctccagctgctttgctccgggctgattgacccgcaatgtcacctggagaaactgcaggtggaatactgcaatctcacagcagcctcgtgcgaaagcttggcgagcgctctgcgtgccaaacgccattttaaagaattagcggtttcgaacaacgaactgggtgaagcaggcgtgcgcgtactttgtcgtgggctggtggatagtgcgtgccaactggaggttctgaaactggaaaattgtggattgacctctgcctcctgcgaggatctttgtgcggtggtcgctagcaaaccaagcctccaggaattggaccttggcatgaacaaattaggtgaccaaggcatcgcaacgttatgcccgaccctgcttcacccttcatgccagattcgtgttttgtggctctggaactgtgatatcaccaccgccggctgccgcgacctctgtcgtgtattacgcgcgaaggaatccctcaaagagctgagtcttgcgggtaatgccttgggagatgaaggcgcacgtctcttgtgcgaatcgttattagaaccggcgtgccagctcgaaagcctttgggtgaaaagctgttctttcactgctgcttcatgccagcattttagttcgatgttgacgcgcaacaagtgtcttgttgagctccaattgagcaataataaattaggtgattgtggcgtgcagcagctttgccaagggttatctcaaccaggtgcggccctccaggttttgtggttgggcgactgtgatgtaggtcatagtggctgtgcaagcttagcttccgtgttgcttgtcaaccgttccttacgcgaactcgaccttagtaacaactgcatgggcgaagaagggattctccgtttgatggagagcgttgaacaaccgggatgcgtgcttgaacagttggtcctctatgacatctactggtcggaggagatggatcgtgcgttacgtgccttagaagagcgcaaaccgtcattgcgcgtgattttc

SEQ ID NO: 390 - protein, 468 aa, synthetic construct
  REGION 1..468: note = Variant of RNase inhibitor
MHHHHHHGGSGTMSLDIQCQQLSDARWTELLPLLQQSEVVRLDDCGLTEMRCKDISSALQANPSLTELSLCTNELGDAGVHLVLQGLQSPTCKIEKLSLQNCCLTKTGCGVLGDMLRSMPTLRELYLNDNPLGDAGLQLLCSGLIDPQCHLEKLQVEYCNLTAASCESLASALRAKRHFKELAVSNNELGEAGVRVLCRGLVDSACQLEVLKLENCGLTSASCEDLCAVVASKPSLQELDLGMNKLGDQGIATLCPTLLHPSCQIRVLWLWNCDITTAGCRDLCRVLRAKESLKELSLAGNALGDEGARLLCESLLEPACQLESLWVKSCSFTAASCQHFSSMLTRNKCLVELQLSNNKLGDCGVQQLCQGLSQPGAALQVLWLGDCDVGHSGCASLASVLLVNRSLRELDLSNNCMGEEGILRLMESVEQPGCVLEQLVLYDIYWSEEMDRALRALEERKPSLRVIF

SEQ ID NO: 391 - DNA, 1404 bp, synthetic construct
  misc_feature 1..1404: note = Variant of RNase inhibitor
  source 1..1404: mol_type = other DNA
atgcaccatcatcatcatcatggcggtagcggcacgatgtctctggatattcagtgtcaacaattgtcagatgcgcgttggacggaactgttaccgcttctgcaacagagcgaagtggtgcgcctggatgactgcggcctcactgagatgcgctgcaaagacatcagtagtgcactgcaagccaacccatcgttgaccgaattaagcctgtgtacaaatgagctgggtgatgctggagttcatttagtcctgcagggcttgcagtctcctacctgcaagattgaaaaactgtccctccagaactgttgtctgacgaagactggttgcggtgtattaggcgacatgcttcgttcaatgcccaccctgcgcgaactgtatctgaatgataacccgttgggcgatgcgggcctccagctgctttgctccgggctggtggacccgcaatgtcacctggagaaactgcaggtggaatactgcaatctcacagcagcctcgtgcgaaagcttggcgagcgctctgcgtgccaaacgccattttaaagaattagcggtttcgaacaacgaactgggtgaagcaggcgtgcgcgtactttgtcgtgggctggtggatagtgcgtgccaactggaggttctgaaactggaaaattgtggattgacctctgcctcctgcgaggatctttgtcgtgtggtcgctagcaaaccaagcctccaggaattggaccttggcatgaacaaattaggtgaccaaggcatcgcaacgttatgcccgaccctgcttcacccttcatgccagattcgtgttttgtggctctggaactgtgatatcaccaccgccggctgccgcgacctctgtcgtgtattacgcgcgaagccgtccctcaaagagctgagtcttgcgggtaatgccttgggagatgaaggcgcacgtctcttgtgcgaatcgttattagaaccgacttgccagctcgaaagcctttgggtgaaaagctgttctttcactgctgcttcatgccagcattttagttcgatgttgacgcgcaacaagtgtcttgttgagctccaattgagcaataataaattaggtgattgtggcgtgcagcagctttgccaagggttatctcaaccaggtgcggccctccaggttttgtggttgggcgactgtgatgtaggtcatagtggctgtgcaagcttagcttccgtgttgcttgtcaaccgttccttacgcgaactcgaccttagtaacaactgcatgggcgaagaagggattctccgtttgatggagagcgttgaacaaccgggatgcgtgcttgaacagttggtcctctatgacatctactggtcggaggagatggatcgtcgtttacgtgccttagaagagcgcaaaccgtcattgcgcgtgattttc

SEQ ID NO: 392 - protein, 468 aa, synthetic construct
  REGION 1..468: note = Variant of RNase inhibitor
MHHHHHHGGSGTMSLDIQCQQLSDARWTELLPLLQQSEVVRLDDCGLTEMRCKDISSALQANPSLTELSLCTNELGDAGVHLVLQGLQSPTCKIEKLSLQNCCLTKTGCGVLGDMLRSMPTLRELYLNDNPLGDAGLQLLCSGLVDPQCHLEKLQVEYCNLTAASCESLASALRAKRHFKELAVSNNELGEAGVRVLCRGLVDSACQLEVLKLENCGLTSASCEDLCRVVASKPSLQELDLGMNKLGDQGIATLCPTLLHPSCQIRVLWLWNCDITTAGCRDLCRVLRAKPSLKELSLAGNALGDEGARLLCESLLEPTCQLESLWVKSCSFTAASCQHFSSMLTRNKCLVELQLSNNKLGDCGVQQLCQGLSQPGAALQVLWLGDCDVGHSGCASLASVLLVNRSLRELDLSNNCMGEEGILRLMESVEQPGCVLEQLVLYDIYWSEEMDRRLRALEERKPSLRVIF

SEQ ID NO: 393 - DNA, 1404 bp, synthetic construct
  misc_feature 1..1404: note = Variant of RNase inhibitor
  source 1..1404: mol_type = other DNA
atgcaccatcatcatcatcatggcggtagcggcacgatgtctctggatattcagtgtcaacaattgtcagatgcgcgttggacggaactgttaccgcttctgcaacagtgtgaagtggtgcgcctggatgactgcggcctcactgagatgcgctgcaaagacatcagtagtgcactgcaagccaacccatcgttgaccgaattaagcctgtgtacaaatgagctgggtgatgctggagttcatttagtcctgcagggcttgcagtctcctacctgcaagattgaaaaactgtccctccagaactgttgtctgacgaagactggttgcggtgtattaggcgacatgcttcgttcaatgcccaccctgcgcgaactgtatctgaatgataacccgttgggcgatgcgggcctccagctgctttgctccgggctggtggacccgcaatgtcacctggagaaactgcaggtggaatactgcaatctcacagcagcctcgtgcgaaagcttggcgagcgctctgcgtgccaaacgccattttaaagaattagcggtttcgaacaacgaactgggtgaagcaggcgtgcgcgtactttgtcgtgggctggtggatagtgcgtgccaactggaggttctgaaactggaaaattgtggattgacctctgcctcctgcgaggatctttgtcgtgtggtcgctagcaaaccaagcctccaggaattggaccttggcatgaacaaattaggtgaccaaggcatcgcaacgttatgcccgaccctgcttcacccttcatgccagattcgtgttttgtggctctggaactgtgatatcaccaccgccggctgccgcgacctctgtcgtgtattacgcgcgaagccgtccctcaaagagctgagtcttgcgggtaatgccttgggagatgaaggcgcacgtctcttgtgcgaatcgttattagaaccggcgtgccagctcgaaagcctttgggtgaaaagctgttctttcactgctgcttcatgccagcattttagttcgatgttgacgcgcaacaagtgtcttgttgagctccaattgagcaataataaattaggtgattgtggcgtgcagcagctttgccaagggttatctcaaccaggtgcggccctccaggttttgtggttgggcgactgtgatgtaggtcatagtggctgtgcaagcttagcttccgtgttgcttgtcaaccgttccttacgcgaactcgaccttagtaacaactgcatgggcgaagaagggattctccgtttgatggagagcgttgaacaaccgggatgcgtgcttgaacagttggtcctctatgacatctactggtcggaggagatggatcgtcgtttacgtgccttagaagagcgcaaaccgtcattgcgcgtgattttc

SEQ ID NO: 394 - protein, 468 aa, synthetic construct
  REGION 1..468: note = Variant of RNase inhibitor
MHHHHHHGGSGTMSLDIQCQQLSDARWTELLPLLQQCEVVRLDDCGLTEMRCKDISSALQANPSLTELSLCTNELGDAGVHLVLQGLQSPTCKIEKLSLQNCCLTKTGCGVLGDMLRSMPTLRELYLNDNPLGDAGLQLLCSGLVDPQCHLEKLQVEYCNLTAASCESLASALRAKRHFKELAVSNNELGEAGVRVLCRGLVDSACQLEVLKLENCGLTSASCEDLCRVVASKPSLQELDLGMNKLGDQGIATLCPTLLHPSCQIRVLWLWNCDITTAGCRDLCRVLRAKPSLKELSLAGNALGDEGARLLCESLLEPACQLESLWVKSCSFTAASCQHFSSMLTRNKCLVELQLSNNKLGDCGVQQLCQGLSQPGAALQVLWLGDCDVGHSGCASLASVLLVNRSLRELDLSNNCMGEEGILRLMESVEQPGCVLEQLVLYDIYWSEEMDRRLRALEERKPSLRVIF

SEQ ID NO: 395 - DNA, 1404 bp, synthetic construct
  misc_feature 1..1404: note = Variant of RNase inhibitor
  source 1..1404: mol_type = other DNA
atgcaccatcatcatcatcatggcggtagcggcacgatgtctctggatattcagtgtcaacaattgtcagatgcgcgttggacggaactgttaccgcttctgcaacagagcgaagtggtgcgcctggatgactgcggcctcactgagatgcgctgcaaagacatcagtagtgcactgaaggccaacccatcgttgaccgaattaagcctgtgtacaaatgagctgggtgatgctggagttcatttagtcctgcagggcttgcagtctcctacctgcaagattgaaaaactgtccctccagaactgttgtctgacgaagactggttgcggtgtattaggcgacatgcttcgttcaatgcccaccctgcgcgaactgtatctgaatgataacccgttgggcgatgcgggcctccagctgctttgctccgggctggtggacccgcaatgtcacctggagaaactgcaggtggaatactgcaatctcacagcagcctcgtgcgaaagcttggcgagcgctctgcgtgccaaacgccattttaaagaattagcggtttcgaacaacgaactgggtgaagcaggcgtgcgcgtactttgtcgtgggctggtggatagtgcgtgccaactggaggttctgaaactggaaaattgtggattgacctctgcctcctgcgaggatctttgtcgtgtggtcgctagcaaaccaagcctccaggaattggaccttggcatgaacaaattaggtgaccaaggcatcgcaacgttatgcccgaccctgcttcacccttcatgccagattcgtgttttgtggctctggaactgtgatatcaccaccgccggctgccgcgacctctgtcgtgtattacgcgcgaagccgtccctcaaagagctgagtcttgcgggtaatgccttgggagatgaaggcgcacgtctcttgtgcgaatcgttattagaaccggcgtgccagctcgaaagcctttgggtgaaaagctgttctttcactgctgcttcatgccagcattttagttcgatgttgacgcgcaacaagtgtcttgttgagctccaattgagcaataataaattaggtgattgtggcgtgcagcagctttgccaagggttatctcaaccaggtgcggccctccaggttttgtggttgggcgactgtgatgtaggtcatagtggctgtgcaagcttagcttccgtgttgcttgtcaaccgttccttacgcgaactcgaccttagtaacaactgcatgggcgaagaagggattctccgtttgatggagagcgttgaacaaccgggatgcgtgcttgaacagttggtcctctatgacatctactggtcggaggagatggatcgtcgtttacgtgccttagaagagcgcaaaccgtcattgcgcgtgattttc

SEQ ID NO: 396 - protein, 468 aa, synthetic construct
  REGION 1..468: note = Variant of RNase inhibitor
MHHHHHHGGSGTMSLDIQCQQLSDARWTELLPLLQQSEVVRLDDCGLTEMRCKDISSALKANPSLTELSLCTNELGDAGVHLVLQGLQSPTCKIEKLSLQNCCLTKTGCGVLGDMLRSMPTLRELYLNDNPLGDAGLQLLCSGLVDPQCHLEKLQVEYCNLTAASCESLASALRAKRHFKELAVSNNELGEAGVRVLCRGLVDSACQLEVLKLENCGLTSASCEDLCRVVASKPSLQELDLGMNKLGDQGIATLCPTLLHPSCQIRVLWLWNCDITTAGCRDLCRVLRAKPSLKELSLAGNALGDEGARLLCESLLEPACQLESLWVKSCSFTAASCQHFSSMLTRNKCLVELQLSNNKLGDCGVQQLCQGLSQPGAALQVLWLGDCDVGHSGCASLASVLLVNRSLRELDLSNNCMGEEGILRLMESVEQPGCVLEQLVLYDIYWSEEMDRRLRALEERKPSLRVIF

SEQ ID NO: 397 - DNA, 1404 bp, synthetic construct
  misc_feature 1..1404: note = Variant of RNase inhibitor
  source 1..1404: mol_type = other DNA
atgcaccatcatcatcatcatggcggtagcggcacgatgtctctggatattcagtgtcaacaattgtcagatgcgcgttggacggaactgttaccgcttctgcaacagagcgaagtggtgcgcctggatgactgcggcctcactgagatgcgctgcaaagacatcagtagtgcactgcaagccaacccatcgttgaccgaattaagcctgtgtacaaatgagctgggtgatgctggagttcatttagtcctgcagggcttgcagtctcctacctgcaagattgaaaaactgtccctccagaactgttgtctgacgaagactggttgcggtgtattaggcgacatgcttcgttcaatgcccaccctgcgcgaactgtatctgaatgataacccgttgggcgatgcgggcctccagctgctttgctccgggctggtggacccgcaatgtcacctggagaaactgcaggtggaatactgcaatctcacagcagcctcgtgcgaaagcttggcgagcgctctgcgtgccaaacgccattttaaagaattagcggtttcgaacaacgaactgggtgaagcaggcgtgcgcgtactttgtcgtgggctggtggatagtgcgtgccaactggaggttctgaaactggaaaattgtggattgacctctgcctcctgcgaggatctttgtcgtgtggtcgctagcaaaccaagcctccaggaattggaccttggcatgaacaaattaggtgaccaaggcatcgcaacgttatgcccgaccctgcttcacccttcatgccagattcgtgttttgtggctctggaactgtgatatcaccaccgccggctgccgcgacctctgtcgtgtattacgcgcgaagccgtccctcaaagagctgagtcttgcgggtaatgccttgggagatgaaggcgcacgtctcttgtgcgaatcgttattagaaccggcgtgccagctcgaaagcctttgggtgaaaagctgttctttcactgctgcttcatgccagcattttagtgctatgttgacgcgcaacaagtgtcttgttgagctccaattgagcaataataaattaggtgattgtggcgtgcagcagctttgccaagggttatctcaaccaggtgcggccctccaggttttgtggttgggcgactgtgatgtaggtcatagtggctgtgcaagcttagcttccgtgttgcttgtcaaccgttccttacgcgaactcgaccttagtaacaactgcatgggcgaagaagggattctccgtttgatggagagcgttgaacaaccgggatgcgtgcttgaacagttggtcctctatgacatctactggtcggaggagatggatcgtcgtttacgtgccttagaagagcgcaaaccgtcattgcgcgtgattttc

SEQ ID NO: 398 - protein, 468 aa, synthetic construct
  REGION 1..468: note = Variant of RNase inhibitor
MHHHHHHGGSGTMSLDIQCQQLSDARWTELLPLLQQSEVVRLDDCGLTEMRCKDISSALQANPSLTELSLCTNELGDAGVHLVLQGLQSPTCKIEKLSLQNCCLTKTGCGVLGDMLRSMPTLRELYLNDNPLGDAGLQLLCSGLVDPQCHLEKLQVEYCNLTAASCESLASALRAKRHFKELAVSNNELGEAGVRVLCRGLVDSACQLEVLKLENCGLTSASCEDLCRVVASKPSLQELDLGMNKLGDQGIATLCPTLLHPSCQIRVLWLWNCDITTAGCRDLCRVLRAKPSLKELSLAGNALGDEGARLLCESLLEPACQLESLWVKSCSFTAASCQHFSAMLTRNKCLVELQLSNNKLGDCGVQQLCQGLSQPGAALQVLWLGDCDVGHSGCASLASVLLVNRSLRELDLSNNCMGEEGILRLMESVEQPGCVLEQLVLYDIYWSEEMDRRLRALEERKPSLRVIF

SEQ ID NO: 399 - DNA, 1404 bp, synthetic construct
  misc_feature 1..1404: note = Variant of RNase inhibitor
  source 1..1404: mol_type = other DNA
atgcaccatcatcatcatcatggcggtagcggcacgatgtctctggatattcagtgtcaacaattgtcagatgcgcgttggacggaactgttaccgcttctgcaacagagcgaagtggtgcgcctggatgactgcggcctcactgagatgcgctgcaaagacatcagtagtgcactgcaagccaacccatcgttgaccgaattaagcctgtgtacaaatgagctgggtgatgctggagttcatttagtcctgcagggcttgcagtctcctacctgcaagattgaaaaactgtccctccagaactgttgtctgacgaagactggttgcggtgtattaggcgacatgcttcgttcaatgcccaccctgcgcgaactgtatctgaatgataacccgttgggcgatgcgggcctccagctgctttgctccgggctggtggacccgcaatgtcacctggagaaactgcaggtggaatactgcaatctcacagcagcctcgtgcgaaagcttggcgagcgctctgcgtgccaaacgccattttaaagaattagcggtttcgaacaacgaactgggtgaagcaggcgtgcgcgtactttgtcgtgggctggtggatagtgcgtgccaactggaggttctgaaactggaaaattgtggattgacctctgcctcctgcgaggatctttgtcgtgtggtcgctagcaaaccaagcctccaggaattggaccttggcatgaacaaattaggtgaccaaggcatcgcaacgttatgcccgaccctgcttcacccttcatgccagattcgtgttttgtggctctggaactgtgatatcaccaccgccggctgccgcgacctctgtcgtgtattacgcgcgaagccgtccctcaaagagctgagtcttgcgggtaatgccttgggagatgaaggcgcacgtctcttgtgcgaatcgttattagaaccggcgtgccagctcgaaagcctttgggtgaaaagctgttctttcactgctgcttcatgccagcattttagtatgatgttgacgcgcaacaagtgtcttgttgagctccaattgagcaataataaattaggtgattgtggcgtgcagcagctttgccaagggttatctcaaccaggtgcggccctccaggttttgtggttgggcgactgtgatgtaggtcatagtggctgtgcaagcttagcttccgtgttgcttgtcaaccgttccttacgcgaactcgaccttagtaacaactgcatgggcgaagaagggattctccgtttgatggagagcgttgaacaaccgggatgcgtgcttgaacagttggtcctctatgacatctactggtcggaggagatggatcgtcgtttacgtgccttagaagagcgcaaaccgtcattgcgcgtgattttc

SEQ ID NO: 400 - protein, 468 aa, synthetic construct
  REGION 1..468: note = Variant of RNase inhibitor
MHHHHHHGGSGTMSLDIQCQQLSDARWTELLPLLQQSEVVRLDDCGLTEMRCKDISSALQANPSLTELSLCTNELGDAGVHLVLQGLQSPTCKIEKLSLQNCCLTKTGCGVLGDMLRSMPTLRELYLNDNPLGDAGLQLLCSGLVDPQCHLEKLQVEYCNLTAASCESLASALRAKRHFKELAVSNNELGEAGVRVLCRGLVDSACQLEVLKLENCGLTSASCEDLCRVVASKPSLQELDLGMNKLGDQGIATLCPTLLHPSCQIRVLWLWNCDITTAGCRDLCRVLRAKPSLKELSLAGNALGDEGARLLCESLLEPACQLESLWVKSCSFTAASCQHFSMMLTRNKCLVELQLSNNKLGDCGVQQLCQGLSQPGAALQVLWLGDCDVGHSGCASLASVLLVNRSLRELDLSNNCMGEEGILRLMESVEQPGCVLEQLVLYDIYWSEEMDRRLRALEERKPSLRVIF

SEQ ID NO: 401 - DNA, 1404 bp, synthetic construct
  misc_feature 1..1404: note = Variant of RNase inhibitor
  source 1..1404: mol_type = other DNA
atgcaccatcatcatcatcatggcggtagcggcacgatgtctctggatattcagtgtcaacaattgtcagatgcgcgttggacggaactgttaccgcttctgcaacagagcgaagtggtgcgcctggatgactgcggcctcactgagatgcgctgcaaagacatcagtagtgcactgcaagccaacccatcgttgaccgaattaagcctgtgtacaaatgagctgggtgatgctggagttgtgttagtcctgcagggcttgcagtctcctacctgcaagattgaaaaactgtccctccagaactgttgtctgacgaagactggttgcggtgtattaggcgacatgcttcgttcaatgcccaccctgcgcgaactgtatctgaatgataacccgttgggcgatgcgggcctccagctgctttgctccgggctggtggacccgcaatgtcacctggagaaactgcaggtggaatactgcaatctcacagcagcctcgtgcgaaagcttggcgagcgctctgcgtgccaaacgccattttaaagaattagcggtttcgaacaacgaactgggtgaagcaggcgtgcgcgtactttgtcgtgggctggtggatagtgcgtgccaactggaggttctgaaactggaaaattgtggattgacctctgcctcctgcgaggatctttgtcgtgtggtcgctagcaaaccaagcctccaggaattggaccttggcatgaacaaattaggtgaccaaggcatcgcaacgttatgcccgaccctgcttcacccttcatgccagattcgtgttttgtggctctggaactgtgatatcaccaccgccggctgccgcgacctctgtcgtgtattacgcgcgaagccgtccctcaaagagctgagtcttgcgggtaatgccttgggagatgaaggcgcacgtctcttgtgcgaatcgttattagaaccggcgtgccagctcgaaagcctttgggtgaaaagctgttctttcactgctgcttcatgccagcattttagttcgatgttgacgcgcaacaagtgtcttgttgagctccaattgagcaataataaattaggtgattgtggcgtgcagcagctttgccaagggttatctcaaccaggtgcggccctccaggttttgtggttgggcgactgtgatgtaggtcatagtggctgtgcaagcttagcttccgtgttgcttgtcaaccgttccttacgcgaactcgaccttagtaacaactgcatgggcgaagaagggattctccgtttgatggagagcgttgaacaaccgggatgcgtgcttgaacagttggtcctctatgacatctactggtcggaggagatggatcgtcgtttacgtgccttagaagagcgcaaaccgtcattgcgcgtgattttc

SEQ ID NO: 402 - protein, 468 aa, synthetic construct
  REGION 1..468: note = Variant of RNase inhibitor
MHHHHHHGGSGTMSLDIQCQQLSDARWTELLPLLQQSEVVRLDDCGLTEMRCKDISSALQANPSLTELSLCTNELGDAGVVLVLQGLQSPTCKIEKLSLQNCCLTKTGCGVLGDMLRSMPTLRELYLNDNPLGDAGLQLLCSGLVDPQCHLEKLQVEYCNLTAASCESLASALRAKRHFKELAVSNNELGEAGVRVLCRGLVDSACQLEVLKLENCGLTSASCEDLCRVVASKPSLQELDLGMNKLGDQGIATLCPTLLHPSCQIRVLWLWNCDITTAGCRDLCRVLRAKPSLKELSLAGNALGDEGARLLCESLLEPACQLESLWVKSCSFTAASCQHFSSMLTRNKCLVELQLSNNKLGDCGVQQLCQGLSQPGAALQVLWLGDCDVGHSGCASLASVLLVNRSLRELDLSNNCMGEEGILRLMESVEQPGCVLEQLVLYDIYWSEEMDRRLRALEERKPSLRVIF

SEQ ID NO: 403 - DNA, 1404 bp, synthetic construct
  misc_feature 1..1404: note = Variant of RNase inhibitor
  source 1..1404: mol_type = other DNA
atgcaccatcatcatcatcatggcggtagcggcacgatgtctctggatattcagtgtcaacaattgtcagatgcgcgttggacggaactgttaccgcttctgcaacagagcgaagtggtgcgcctggatgactgcggcctcactgagatgcgctgcaaagacatcagtagtgcactgcaagccaacccatcgttgaccgaattaagcctgtgtacaaatgagctgggtgatgctggagttatgttagtcctgcagggcttgcagtctcctacctgcaagattgaaaaactgtccctccagaactgttgtctgacgaagactggttgcggtgtattaggcgacatgcttcgttcaatgcccaccctgcgcgaactgtatctgaatgataacccgttgggcgatgcgggcctccagctgctttgctccgggctggtggacccgcaatgtcacctggagaaactgcaggtggaatactgcaatctcacagcagcctcgtgcgaaagcttggcgagcgctctgcgtgccaaacgccattttaaagaattagcggtttcgaacaacgaactgggtgaagcaggcgtgcgcgtactttgtcgtgggctggtggatagtgcgtgccaactggaggttctgaaactggaaaattgtggattgacctctgcctcctgcgaggatctttgtcgtgtggtcgctagcaaaccaagcctccaggaattggaccttggcatgaacaaattaggtgaccaaggcatcgcaacgttatgcccgaccctgcttcacccttcatgccagattcgtgttttgtggctctggaactgtgatatcaccaccgccggctgccgcgacctctgtcgtgtattacgcgcgaagccgtccctcaaagagctgagtcttgcgggtaatgccttgggagatgaaggcgcacgtctcttgtgcgaatcgttattagaaccggcgtgccagctcgaaagcctttgggtgaaaagctgttctttcactgctgcttcatgccagcattttagttcgatgttgacgcgcaacaagtgtcttgttgagctccaattgagcaataataaattaggtgattgtggcgtgcagcagctttgccaagggttatctcaaccaggtgcggccctccaggttttgtggttgggcgactgtgatgtaggtcatagtggctgtgcaagcttagcttccgtgttgcttgtcaaccgttccttacgcgaactcgaccttagtaacaactgcatgggcgaagaagggattctccgtttgatggagagcgttgaacaaccgggatgcgtgcttgaacagttggtcctctatgacatctactggtcggaggagatggatcgtcgtttacgtgccttagaagagcgcaaaccgtcattgcgcgtgattttc

SEQ ID NO: 404 - protein, 468 aa, synthetic construct
  REGION 1..468: note = Variant of RNase inhibitor
MHHHHHHGGSGTMSLDIQCQQLSDARWTELLPLLQQSEVVRLDDCGLTEMRCKDISSALQANPSLTELSLCTNELGDAGVMLVLQGLQSPTCKIEKLSLQNCCLTKTGCGVLGDMLRSMPTLRELYLNDNPLGDAGLQLLCSGLVDPQCHLEKLQVEYCNLTAASCESLASALRAKRHFKELAVSNNELGEAGVRVLCRGLVDSACQLEVLKLENCGLTSASCEDLCRVVASKPSLQELDLGMNKLGDQGIATLCPTLLHPSCQIRVLWLWNCDITTAGCRDLCRVLRAKPSLKELSLAGNALGDEGARLLCESLLEPACQLESLWVKSCSFTAASCQHFSSMLTRNKCLVELQLSNNKLGDCGVQQLCQGLSQPGAALQVLWLGDCDVGHSGCASLASVLLVNRSLRELDLSNNCMGEEGILRLMESVEQPGCVLEQLVLYDIYWSEEMDRRLRALEERKPSLRVIF

SEQ ID NO: 405 - DNA, 1404 bp, synthetic construct
  misc_feature 1..1404: note = Variant of RNase inhibitor
  source 1..1404: mol_type = other DNA
atgcaccatcatcatcatcatggcggtagcggcacgatgtctctggatattcagtgtcaacaattgtcagatgcgcgttggacggaactgttaccgcttctgcaacagagcgaagtggtgcgcctggatgactgcggcctcactgagagtcgctgcaaagacatcagtagtgcactgcaagccaacccatcgttgaccgaattaagcctgtgtacaaatgagctgggtgatgctggagttcatttagtcctgcagggcttgcagtctcctacctgcaagattgaaaaactgtccctccagaactgttgtctgacgaagactggttgcggtgtattaggcgacatgcttcgttcaatgcccaccctgcgcgaactgtatctgaatgataacccgttgggcgatgcgggcctccagctgctttgctccgggctggtggacccgcaatgtcacctggagaaactgcaggtggaatactgcaatctcacagcagcctcgtgcgaaagcttggcgagcgctctgcgtgccaaacgccattttaaagaattagcggtttcgaacaacgaactgggtgaagcaggcgtgcgcgtactttgtcgtgggctggtggatagtgcgtgccaactggaggttctgaaactggaaaattgtggattgacctctgcctcctgcgaggatctttgtcgtgtggtcgctagcaaaccaagcctccaggaattggaccttggcatgaacaaattaggtgaccaaggcatcgcaacgttatgcccgaccctgcttcacccttcatgccagattcgtgttttgtggctctggaactgtgatatcaccaccgccggctgccgcgacctctgtcgtgtattacgcgcgaagccgtccctcaaagagctgagtcttgcgggtaatgccttgggagatgaaggcgcacgtctcttgtgcgaatcgttattagaaccggcgtgccagctcgaaagcctttgggtgaaaagctgttctttcactgctgcttcatgccagcattttagttcgatgttgacgcgcaacaagtgtcttgttgagctccaattgagcaataataaattaggtgattgtggcgtgcagcagctttgccaagggttatctcaaccaggtgcggccctccaggttttgtggttgggcgactgtgatgtaggtcatagtggctgtgcaagcttagcttccgtgttgcttgtcaaccgttccttacgcgaactcgaccttagtaacaactgcatgggcgaagaagggattctccgtttgatggagagcgttgaacaaccgggatgcgtgcttgaacagttggtcctctatgacatctactggtcggaggagatggatcgtcgtttacgtgccttagaagagcgcaaaccgtcattgcgcgtgattttc

SEQ ID NO: 406 - protein, 468 aa, synthetic construct
  REGION 1..468: note = Variant of RNase inhibitor
MHHHHHHGGSGTMSLDIQCQQLSDARWTELLPLLQQSEVVRLDDCGLTESRCKDISSALQANPSLTELSLCTNELGDAGVHLVLQGLQSPTCKIEKLSLQNCCLTKTGCGVLGDMLRSMPTLRELYLNDNPLGDAGLQLLCSGLVDPQCHLEKLQVEYCNLTAASCESLASALRAKRHFKELAVSNNELGEAGVRVLCRGLVDSACQLEVLKLENCGLTSASCEDLCRVVASKPSLQELDLGMNKLGDQGIATLCPTLLHPSCQIRVLWLWNCDITTAGCRDLCRVLRAKPSLKELSLAGNALGDEGARLLCESLLEPACQLESLWVKSCSFTAASCQHFSSMLTRNKCLVELQLSNNKLGDCGVQQLCQGLSQPGAALQVLWLGDCDVGHSGCASLASVLLVNRSLRELDLSNNCMGEEGILRLMESVEQPGCVLEQLVLYDIYWSEEMDRRLRALEERKPSLRVIF

SEQ ID NO: 407 - DNA, 1404 bp, synthetic construct
  misc_feature 1..1404: note = Variant of RNase inhibitor
  source 1..1404: mol_type = other DNA
atgcaccatcatcatcatcatggcggtagcggcacgatgtctctggatattcagtgtcaacaattgtcagatgcgcgttggacggaactgttaccgcttctgcaacagagcgaagtggtgcgcctggatgactgcggcctcactgagatgcgctgcaaagacatcagtagtgcactgcaagccaacccatcgttgaccgaattaagcctgtgtacaaatgagctgggtgatgctggagttcatttagtcctgcagggcttgcagtctcctacctgcaagattgaaaaactgtccctccagaactgttgtctgacgaagactggttgcggtgtattaggcgacatgcttcgttcaatgcccaccctgcgcgaactgtatctgaatgataacccgttgggcgatgcgggcctccagctgctttgctccgggctggtggacccgcaatgtcacctggagaaactgcaggtggaatactgcaatctcacagcagcctcgtgcgaaagcttggcgagcgctctgcgtgccaaacgccattttaaagaattagcggtttcgaacaacgaactgggtgaagcaggcgtgcgcgtactttgtcgtgggctggtggatagtgcgtgccaactggaggttctgaaactggaaaattgtggattgacctctgcctcctgcgaggatctttgtcgtgtggtcgctagcaaaccaagcctccaggaattggaccttggcatgaacaaattaggtgaccaaggcatcgcaacgttatgcccgaccctgcttcacccttcatgccagattcgtgttttgtggctctggaactgtgatatcaccaccgccggctgccgcgacctctgtcgtgtattacgcgcgaagccgtccctcaaagagctgagtcttgcgggtaatgccttgggagatgaaggcgcacgtctcttgtgcgaatcgttattagaaccggcgtgccagctcgaaagcctttgggtgaaaagctgttctttcactgctgcttcatgccagcattttagttcgatgttgacgcgcaacaagtgtcttgttgagctccaattgagcaataataaattaggtgattgtggcgtgcagcagctttgccaagggttatctcaaccaggtgcggccctccaggttttgtggttgggcgactgtgatgtaggtcatagtggctgtttgagcttagcttccgtgttgcttgtcaaccgttccttacgcgaactcgaccttagtaacaactgcatgggcgaagaagggattctccgtttgatggagagcgttgaacaaccgggatgcgtgcttgaacagttggtcctctatgacatctactggtcggaggagatggatcgtcgtttacgtgccttagaagagcgcaaaccgtcattgcgcgtgattttc

SEQ ID NO: 408 - protein, 468 aa, synthetic construct
  REGION 1..468: note = Variant of RNase inhibitor
MHHHHHHGGSGTMSLDIQCQQLSDARWTELLPLLQQSEVVRLDDCGLTEMRCKDISSALQANPSLTELSLCTNELGDAGVHLVLQGLQSPTCKIEKLSLQNCCLTKTGCGVLGDMLRSMPTLRELYLNDNPLGDAGLQLLCSGLVDPQCHLEKLQVEYCNLTAASCESLASALRAKRHFKELAVSNNELGEAGVRVLCRGLVDSACQLEVLKLENCGLTSASCEDLCRVVASKPSLQELDLGMNKLGDQGIATLCPTLLHPSCQIRVLWLWNCDITTAGCRDLCRVLRAKPSLKELSLAGNALGDEGARLLCESLLEPACQLESLWVKSCSFTAASCQHFSSMLTRNKCLVELQLSNNKLGDCGVQQLCQGLSQPGAALQVLWLGDCDVGHSGCLSLASVLLVNRSLRELDLSNNCMGEEGILRLMESVEQPGCVLEQLVLYDIYWSEEMDRRLRALEERKPSLRVIF

SEQ ID NO: 409 - DNA, 1404 bp, synthetic construct
  misc_feature 1..1404: note = Variant of RNase inhibitor
  source 1..1404: mol_type = other DNA
atgcaccatcatcatcatcatggcggtagcggcacgatgtctctggatattcagtgtcaacaattgtcagatgcgcgttggacggaactgttaccgcttctgcaacagagcgaagtggtgcgcctggatgactgcggcctcactgagatgcgctgcaaagacatcagtagtgcactgcaagccaacccaaggttgaccgaattaagcctgtgtacaaatgagctgggtgatgctggagttcatttagtcctgcagggcttgcagtctcctacctgcaagattgaaaaactgtccctccagaactgttgtctgacgaagactggttgcggtgtattaggcgacatgcttcgttcaatgcccaccctgcgcgaactgtatctgaatgataacccgttgggcgatgcgggcctccagctgctttgctccgggctggtggacccgcaatgtcacctggagaaactgcaggtggaatactgcaatctcacagcagcctcgtgcgaaagcttggcgagcgctctgcgtgccaaacgccattttaaagaattagcggtttcgaacaacgaactgggtgaagcaggcgtgcgcgtactttgtcgtgggctggtggatagtgcgtgccaactggaggttctgaaactggaaaattgtggattgacctctgcctcctgcgaggatctttgtcgtgtggtcgctagcaaaccaagcctccaggaattggaccttggcatgaacaaattaggtgaccaaggcatcgcaacgttatgcccgaccctgcttcacccttcatgccagattcgtgttttgtggctctggaactgtgatatcaccaccgccggctgccgcgacctctgtcgtgtattacgcgcgaagccgtccctcaaagagctgagtcttgcgggtaatgccttgggagatgaaggcgcacgtctcttgtgcgaatcgttattagaaccggcgtgccagctcgaaagcctttgggtgaaaagctgttctttcactgctgcttcatgccagcattttagttcgatgttgacgcgcaacaagtgtcttgttgagctccaattgagcaataataaattaggtgattgtggcgtgcagcagctttgccaagggttatctcaaccaggtgcggccctccaggttttgtggttgggcgactgtgatgtaggtcatagtggctgtgcaagcttagcttccgtgttgcttgtcaaccgttccttacgcgaactcgaccttagtaacaactgcatgggcgaagaagggattctccgtttgatggagagcgttgaacaaccgggatgcgtgcttgaacagttggtcctctatgacatctactggtcggaggagatggatcgtcgtttacgtgccttagaagagcgcaaaccgtcattgcgcgtgattttc

SEQ ID NO: 410 - protein, 468 aa, synthetic construct
  REGION 1..468: note = Variant of RNase inhibitor
MHHHHHHGGSGTMSLDIQCQQLSDARWTELLPLLQQSEVVRLDDCGLTEMRCKDISSALQANPRLTELSLCTNELGDAGVHLVLQGLQSPTCKIEKLSLQNCCLTKTGCGVLGDMLRSMPTLRELYLNDNPLGDAGLQLLCSGLVDPQCHLEKLQVEYCNLTAASCESLASALRAKRHFKELAVSNNELGEAGVRVLCRGLVDSACQLEVLKLENCGLTSASCEDLCRVVASKPSLQELDLGMNKLGDQGIATLCPTLLHPSCQIRVLWLWNCDITTAGCRDLCRVLRAKPSLKELSLAGNALGDEGARLLCESLLEPACQLESLWVKSCSFTAASCQHFSSMLTRNKCLVELQLSNNKLGDCGVQQLCQGLSQPGAALQVLWLGDCDVGHSGCASLASVLLVNRSLRELDLSNNCMGEEGILRLMESVEQPGCVLEQLVLYDIYWSEEMDRRLRALEERKPSLRVIF

SEQ ID NO: 411 - DNA, 1404 bp, synthetic construct
  misc_feature 1..1404: note = Variant of RNase inhibitor
  source 1..1404: mol_type = other DNA
atgcaccatcatcatcatcatggcggtagcggcacgatgtctctggatattcagtgtcaacaattgtcagatgcgcgttggacggaactgttaccgcttctgcaacagagcgaagtggtgcgcctggatgactgcggcctcactgagatgcgctgcaaagacatcagtagtgcactgcaagccaacccatcgttgaccgaattaagcctgtgtacaaatgagctgggtgatgctggagttcatttagtcctgcagggcttgcagtctcctacctgcaagattgaaaaactgtccctccagaactgttgtctgacgaagactggttgcggtgtattaggcgacatgcttcgttcaatgcccaccctgcgcgaactgtatctgaatgataacccgttgggcgatgcgggcctccagctgctttgctccgggctggtggacccgcaatgtcacctggagaaactgcaggtggaatactgcaatctcacagcagcctcgtgcgaaagcttggcgagcgctctgcgtgccaaaacgcattttaaagaattagcggtttcgaacaacgaactgggtgaagcaggcgtgcgcgtactttgtcgtgggctggtggatagtgcgtgccaactggaggttctgaaactggaaaattgtggattgacctctgcctcctgcgaggatctttgtcgtgtggtcgctagcaaaccaagcctccaggaattggaccttggcatgaacaaattaggtgaccaaggcatcgcaacgttatgcccgaccctgcttcacccttcatgccagattcgtgttttgtggctctggaactgtgatatcaccaccgccggctgccgcgacctctgtcgtgtattacgcgcgaagccgtccctcaaagagctgagtcttgcgggtaatgccttgggagatgaaggcgcacgtctcttgtgcgaatcgttattagaaccggcgtgccagctcgaaagcctttgggtgaaaagctgttctttcactgctgcttcatgccagcattttagttcgatgttgacgcgcaacaagtgtcttgttgagctccaattgagcaataataaattaggtgattgtggcgtgcagcagctttgccaagggttatctcaaccaggtgcggccctccaggttttgtggttgggcgactgtgatgtaggtcatagtggctgtgcaagcttagcttccgtgttgcttgtcaaccgttccttacgcgaactcgaccttagtaacaactgcatgggcgaagaagggattctccgtttgatggagagcgttgaacaaccgggatgcgtgcttgaacagttggtcctctatgacatctactggtcggaggagatggatcgtcgtttacgtgccttagaagagcgcaaaccgtcattgcgcgtgattttc

SEQ ID NO: 412 - protein, 468 aa, synthetic construct
  REGION 1..468: note = Variant of RNase inhibitor
MHHHHHHGGSGTMSLDIQCQQLSDARWTELLPLLQQSEVVRLDDCGLTEMRCKDISSALQANPSLTELSLCTNELGDAGVHLVLQGLQSPTCKIEKLSLQNCCLTKTGCGVLGDMLRSMPTLRELYLNDNPLGDAGLQLLCSGLVDPQCHLEKLQVEYCNLTAASCESLASALRAKTHFKELAVSNNELGEAGVRVLCRGLVDSACQLEVLKLENCGLTSASCEDLCRVVASKPSLQELDLGMNKLGDQGIATLCPTLLHPSCQIRVLWLWNCDITTAGCRDLCRVLRAKPSLKELSLAGNALGDEGARLLCESLLEPACQLESLWVKSCSFTAASCQHFSSMLTRNKCLVELQLSNNKLGDCGVQQLCQGLSQPGAALQVLWLGDCDVGHSGCASLASVLLVNRSLRELDLSNNCMGEEGILRLMESVEQPGCVLEQLVLYDIYWSEEMDRRLRALEERKPSLRVIF

SEQ ID NO: 413 - DNA, 1404 bp, synthetic construct
  misc_feature 1..1404: note = Variant of RNase inhibitor
  source 1..1404: mol_type = other DNA
atgcaccatcatcatcatcatggcggtagcggcacgatgtctctggatattcagtgtcaacaattgtcagatgcgcgttggacggaactgttaccgcttctgcaacagagcgaagtggtgcgcctggatgactgcggcctcactgagatgcgctgcaaagacatcagtagtgcactgcaagccaacccatcgttgaccgaattaagcctgtgtacaaatgagctgggtgatgctggagttcatttagtcctgcagggcttgcagtctcctacctgcaagattgaaaaactgtccctccagaactgttgtctgacgaaggatggttgcggtgtattaggcgacatgcttcgttcaatgcccaccctgcgcgaactgtatctgaatgataacccgttgggcgatgcgggcctccagctgctttgctccgggctggtggacccgcaatgtcacctggagaaactgcaggtggaatactgcaatctcacagcagcctcgtgcgaaagcttggcgagcgctctgcgtgccaaacgccattttaaagaattagcggtttcgaacaacgaactgggtgaagcaggcgtgcgcgtactttgtcgtgggctggtggatagtgcgtgccaactggaggttctgaaactggaaaattgtggattgacctctgcctcctgcgaggatctttgtcgtgtggtcgctagcaaaccaagcctccaggaattggaccttggcatgaacaaattaggtgaccaaggcatcgcaacgttatgcccgaccctgcttcacccttcatgccagattcgtgttttgtggctctggaactgtgatatcaccaccgccggctgccgcgacctctgtcgtgtattacgcgcgaagccgtccctcaaagagctgagtcttgcgggtaatgccttgggagatgaaggcgcacgtctcttgtgcgaatcgttattagaaccggcgtgccagctcgaaagcctttgggtgaaaagctgttctttcactgctgcttcatgccagcattttagttcgatgttgacgcgcaacaagtgtcttgttgagctccaattgagcaataataaattaggtgattgtggcgtgcagcagctttgccaagggttatctcaaccaggtgcggccctccaggttttgtggttgggcgactgtgatgtaggtcatagtggctgtgcaagcttagcttccgtgttgcttgtcaaccgttccttacgcgaactcgaccttagtaacaactgcatgggcgaagaagggattctccgtttgatggagagcgttgaacaaccgggatgcgtgcttgaacagttggtcctctatgacatctactggtcggaggagatggatcgtcgtttacgtgccttagaagagcgcaaaccgtcattgcgcgtgattttc

SEQ ID NO: 414 - protein, 468 aa, synthetic construct
  REGION 1..468: note = Variant of RNase inhibitor
MHHHHHHGGSGTMSLDIQCQQLSDARWTELLPLLQQSEVVRLDDCGLTEMRCKDISSALQANPSLTELSLCTNELGDAGVHLVLQGLQSPTCKIEKLSLQNCCLTKDGCGVLGDMLRSMPTLRELYLNDNPLGDAGLQLLCSGLVDPQCHLEKLQVEYCNLTAASCESLASALRAKRHFKELAVSNNELGEAGVRVLCRGLVDSACQLEVLKLENCGLTSASCEDLCRVVASKPSLQELDLGMNKLGDQGIATLCPTLLHPSCQIRVLWLWNCDITTAGCRDLCRVLRAKPSLKELSLAGNALGDEGARLLCESLLEPACQLESLWVKSCSFTAASCQHFSSMLTRNKCLVELQLSNNKLGDCGVQQLCQGLSQPGAALQVLWLGDCDVGHSGCASLASVLLVNRSLRELDLSNNCMGEEGILRLMESVEQPGCVLEQLVLYDIYWSEEMDRRLRALEERKPSLRVIF

SEQ ID NO: 415 - DNA, 1404 bp, synthetic construct
  misc_feature 1..1404: note = Variant of RNase inhibitor
  source 1..1404: mol_type = other DNA
atgcaccatcatcatcatcatggcggtagcggcacgatgtctctggatattcagtgtcaacaattgtcagatgcgcgttggacggaactgttaccgcttctgcaacagagcgaagtggtgcgcctggatgactgcggcctcactgagcagcgctgcaaagacatcagtagtgcactgcaagccaacccatcgttgaccgaattaagcctgtgtacaaatgagctgggtgatgctggagttcatttagtcctgcagggcttgcagtctcctacctgcaagattgaaaaactgtccctccagaactgttgtctgacgaagactggttgcggtgtattaggcgacatgcttcgttcaatgcccaccctgcgcgaactgtatctgaatgataacccgttgggcgatgcgggcctccagctgctttgctccgggctggtggacccgcaatgtcacctggagaaactgcaggtggaatactgcaatctcacagcagcctcgtgcgaaagcttggcgagcgctctgcgtgccaaacgccattttaaagaattagcggtttcgaacaacgaactgggtgaagcaggcgtgcgcgtactttgtcgtgggctggtggatagtgcgtgccaactggaggttctgaaactggaaaattgtggattgacctctgcctcctgcgaggatctttgtcgtgtggtcgctagcaaaccaagcctccaggaattggaccttggcatgaacaaattaggtgaccaaggcatcgcaacgttatgcccgaccctgcttcacccttcatgccagattcgtgttttgtggctctggaactgtgatatcaccaccgccggctgccgcgacctctgtcgtgtattacgcgcgaagccgtccctcaaagagctgagtcttgcgggtaatgccttgggagatgaaggcgcacgtctcttgtgcgaatcgttattagaaccggcgtgccagctcgaaagcctttgggtgaaaagctgttctttcactgctgcttcatgccagcattttagttcgatgttgacgcgcaacaagtgtcttgttgagctccaattgagcaataataaattaggtgattgtggcgtgcagcagctttgccaagggttatctcaaccaggtgcggccctccaggttttgtggttgggcgactgtgatgtaggtcatagtggctgtgcaagcttagcttccgtgttgcttgtcaaccgttccttacgcgaactcgaccttagtaacaactgcatgggcgaagaagggattctccgtttgatggagagcgttgaacaaccgggatgcgtgcttgaacagttggtcctctatgacatctactggtcggaggagatggatcgtcgtttacgtgccttagaagagcgcaaaccgtcattgcgcgtgattttc

SEQ ID NO: 416 - protein, 468 aa, synthetic construct
  REGION 1..468: note = Variant of RNase inhibitor
MHHHHHHGGSGTMSLDIQCQQLSDARWTELLPLLQQSEVVRLDDCGLTEQRCKDISSALQANPSLTELSLCTNELGDAGVHLVLQGLQSPTCKIEKLSLQNCCLTKTGCGVLGDMLRSMPTLRELYLNDNPLGDAGLQLLCSGLVDPQCHLEKLQVEYCNLTAASCESLASALRAKRHFKELAVSNNELGEAGVRVLCRGLVDSACQLEVLKLENCGLTSASCEDLCRVVASKPSLQELDLGMNKLGDQGIATLCPTLLHPSCQIRVLWLWNCDITTAGCRDLCRVLRAKPSLKELSLAGNALGDEGARLLCESLLEPACQLESLWVKSCSFTAASCQHFSSMLTRNKCLVELQLSNNKLGDCGVQQLCQGLSQPGAALQVLWLGDCDVGHSGCASLASVLLVNRSLRELDLSNNCMGEEGILRLMESVEQPGCVLEQLVLYDIYWSEEMDRRLRALEERKPSLRVIF

SEQ ID NO: 417 - DNA, 1404 bp, synthetic construct
  misc_feature 1..1404: note = Variant of RNase inhibitor
  source 1..1404: mol_type = other DNA
atgcaccatcatcatcatcatggcggtagcggcacgatgtctctggatattcagtgtcaacaattgtcagatgcgcgttggacggaactgttaccgcttctgcaacaggctgaagtggtgcgcctggatgactgcggcctcactgagatgcgctgcaaagacatcagtagtgcactgcaagccaacccatcgttgaccgaattaagcctgtgtacaaatgagctgggtgatgctggagttcatttagtcctgcagggcttgcagtctcctacctgcaagattgaaaaactgtccctccagaactgttgtctgacgaagactggttgcggtgtattaggcgacatgcttcgttcaatgcccaccctgcgcgaactgtatctgaatgataacccgttgggcgatgcgggcctccagctgctttgctccgggctggtggacccgcaatgtcacctggagaaactgcaggtggaatactgcaatctcacagcagcctcgtgcgaaagcttggcgagcgctctgcgtgccaaacgccattttaaagaattagcggtttcgaacaacgaactgggtgaagcaggcgtgcgcgtactttgtcgtgggctggtggatagtgcgtgccaactggaggttctgaaactggaaaattgtggattgacctctgcctcctgcgaggatctttgtcgtgtggtcgctagcaaaccaagcctccaggaattggaccttggcatgaacaaattaggtgaccaaggcatcgcaacgttatgcccgaccctgcttcacccttcatgccagattcgtgttttgtggctctggaactgtgatatcaccaccgccggctgccgcgacctctgtcgtgtattacgcgcgaagccgtccctcaaagagctgagtcttgcgggtaatgccttgggagatgaaggcgcacgtctcttgtgcgaatcgttattagaaccggcgtgccagctcgaaagcctttgggtgaaaagctgttctttcactgctgcttcatgccagcattttagttcgatgttgacgcgcaacaagtgtcttgttgagctccaattgagcaataataaattaggtgattgtggcgtgcagcagctttgccaagggttatctcaaccaggtgcggccctccaggttttgtggttgggcgactgtgatgtaggtcatagtggctgtgcaagcttagcttccgtgttgcttgtcaaccgttccttacgcgaactcgaccttagtaacaactgcatgggcgaagaagggattctccgtttgatggagagcgttgaacaaccgggatgcgtgcttgaacagttggtcctctatgacatctactggtcggaggagatggatcgtcgtttacgtgccttagaagagcgcaaaccgtcattgcgcgtgattttc

SEQ ID NO: 418 - protein, 468 aa, synthetic construct
  REGION 1..468: note = Variant of RNase inhibitor
MHHHHHHGGSGTMSLDIQCQQLSDARWTELLPLLQQAEVVRLDDCGLTEMRCKDISSALQANPSLTELSLCTNELGDAGVHLVLQGLQSPTCKIEKLSLQNCCLTKTGCGVLGDMLRSMPTLRELYLNDNPLGDAGLQLLCSGLVDPQCHLEKLQVEYCNLTAASCESLASALRAKRHFKELAVSNNELGEAGVRVLCRGLVDSACQLEVLKLENCGLTSASCEDLCRVVASKPSLQELDLGMNKLGDQGIATLCPTLLHPSCQIRVLWLWNCDITTAGCRDLCRVLRAKPSLKELSLAGNALGDEGARLLCESLLEPACQLESLWVKSCSFTAASCQHFSSMLTRNKCLVELQLSNNKLGDCGVQQLCQGLSQPGAALQVLWLGDCDVGHSGCASLASVLLVNRSLRELDLSNNCMGEEGILRLMESVEQPGCVLEQLVLYDIYWSEEMDRRLRALEERKPSLRVIF

SEQ ID NO: 419 - DNA, 1404 bp, synthetic construct
  misc_feature 1..1404: note = Variant of RNase inhibitor
  source 1..1404: mol_type = other DNA
atgcaccatcatcatcatcatggcggtagcggcacgatgtctctggatattcagtgtcaacaattgtcagatgcgcgttggacggaactgttaccgcttctgcaacagagcgaagtggtgcgcctggatgactgcggcctcactgagatgcgctgcaaagacatcagtagtgcactgcaagccaacccatcgttgaccgaattaagcctgtgtacaaatgagctgggtgatgctggagttcatttagtcctgcagggcttgcagtctcctacctgcaagattgaaaaactgtccctccagaactgttgtctgacgaagactggttgcggtgtattaggcgacatgcttcgttcaatgcccaccctgcgcgaactgtatctgaatgataacccgttgggcgatgcgggcctccagctgctttgctccgggctggtggacccgcaatgtcacctggagaaactgcaggtggaatactgcaatctcacagcagcctcgtgcgaaagcttggcgagcgctctgcgtgccaaacgccattttaaagaattagcggtttcgaacaacgaactgggtgaagcaggcgtgcgcgtactttgtcgtgggctggtggatagtgcgtgccaactggaggttctgaaactggaaaattgtggattgacctctgcctcctgcgaggatctttgtcgtgtggtcgctagcaaaccaagcctccaggaattggaccttggcatgaacaaattaggtgaccaaggcatcgcaacgttatgcccgaccctgcttcacccttcatgccagattcgtgttttgtggctctggaactgtgatatcaccaccgccggctgccgcgacctctgtcgtgtattacgcgcgaagccgtccctcaaagagctgagtcttgcgggtaatgccttgggagatgaaggcgcacgtctcttgtgcgaatcgttattagaaccggcgtgccagctcgaaagcctttgggtgaaaagctgttctttcactgctgcttcatgccagcattttagttcgatgttgacgcgcaacaagtgtcttgttgagctccaattgagcaataataaattaggtgattgtggcgtgcagcagctttgccaagggttagctcaaccaggtgcggccctccaggttttgtggttgggcgactgtgatgtaggtcatagtggctgtgcaagcttagcttccgtgttgcttgtcaaccgttccttacgcgaactcgaccttagtaacaactgcatgggcgaagaagggattctccgtttgatggagagcgttgaacaaccgggatgcgtgcttgaacagttggtcctctatgacatctactggtcggaggagatggatcgtcgtttacgtgccttagaagagcgcaaaccgtcattgcgcgtgattttc

SEQ ID NO: 420 - protein, 468 aa, synthetic construct
  REGION 1..468: note = Variant of RNase inhibitor
MHHHHHHGGSGTMSLDIQCQQLSDARWTELLPLLQQSEVVRLDDCGLTEMRCKDISSALQANPSLTELSLCTNELGDAGVHLVLQGLQSPTCKIEKLSLQNCCLTKTGCGVLGDMLRSMPTLRELYLNDNPLGDAGLQLLCSGLVDPQCHLEKLQVEYCNLTAASCESLASALRAKRHFKELAVSNNELGEAGVRVLCRGLVDSACQLEVLKLENCGLTSASCEDLCRVVASKPSLQELDLGMNKLGDQGIATLCPTLLHPSCQIRVLWLWNCDITTAGCRDLCRVLRAKPSLKELSLAGNALGDEGARLLCESLLEPACQLESLWVKSCSFTAASCQHFSSMLTRNKCLVELQLSNNKLGDCGVQQLCQGLAQPGAALQVLWLGDCDVGHSGCASLASVLLVNRSLRELDLSNNCMGEEGILRLMESVEQPGCVLEQLVLYDIYWSEEMDRRLRALEERKPSLRVIF

SEQ ID NO: 421 - DNA, 1404 bp, synthetic construct
  misc_feature 1..1404: note = Variant of RNase inhibitor
  source 1..1404: mol_type = other DNA
atgcaccatcatcatcatcatggcggtagcggcacgatgtctctggatattcagtgtcaacaattgtcagatgcgcgttggacggaactgttaccgcttctgcaacagagcgaagtggtgcgcctggatgactgcggcctcactgagatgcgctgcaaagacatcagtagtgcactgcaagccaacccatcgttgaccgaattaagcctgtgtacaaatgagctgggtgatgctggagttcatttagtcctgcagggcttgcagtctcctacctgcaagattgaaaaactgtccctccagaactgttgtctgacgaagactggttgcggtgtattaggcgacatgcttcgttcaatgcccaccctgcgcgaactgtatctgaatgataacccgttgggcgatgcgggcctccagctgctttgctccgggctggtggacccgcaatgtcacctggagaaactgcaggtggaatactgcaatctcacagcagcctcgtgcgaaagcttggcgagcgctctgcgtgccaaacgccattttaaagaattagcggtttcgaacaacgaactgggtgaagcaggcgtgcgcgtactttgtcgtgggctggtggatagtgcgtgccaactggaggttctgaaactggaaaattgtggattgacctctgcctcctgcgaggatctttgtcgtgtggtcgctagcaaaccaagcctccaggaattggaccttggcatgaacaaattaggtgaccaaggcatcgcaacgttatgcccgaccctgcttcacccttcatgccagattcgtgttttgtggctctggaactgtgatatcaccaccgccggctgccgcgacctctgtcgtgtattacgcgcgaagccgtccctcaaagagctgagtcttgcgggtaatgccttgggagatgaaggcgcacgtctcttgtgcgaatcgttattagaaccggggtgccagctcgaaagcctttgggtgaaaagctgttctttcactgctgcttcatgccagcattttagttcgatgttgacgcgcaacaagtgtcttgttgagctccaattgagcaataataaattaggtgattgtggcgtgcagcagctttgccaagggttatctcaaccaggtgcggccctccaggttttgtggttgggcgactgtgatgtaggtcatagtggctgtgcaagcttagcttccgtgttgcttgtcaaccgttccttacgcgaactcgaccttagtaacaactgcatgggcgaagaagggattctccgtttgatggagagcgttgaacaaccgggatgcgtgcttgaacagttggtcctctatgacatctactggtcggaggagatggatcgtcgtttacgtgccttagaagagcgcaaaccgtcattgcgcgtgattttc

SEQ ID NO: 422 - protein, 468 aa, synthetic construct
  REGION 1..468: note = Variant of RNase inhibitor
MHHHHHHGGSGTMSLDIQCQQLSDARWTELLPLLQQSEVVRLDDCGLTEMRCKDISSALQANPSLTELSLCTNELGDAGVHLVLQGLQSPTCKIEKLSLQNCCLTKTGCGVLGDMLRSMPTLRELYLNDNPLGDAGLQLLCSGLVDPQCHLEKLQVEYCNLTAASCESLASALRAKRHFKELAVSNNELGEAGVRVLCRGLVDSACQLEVLKLENCGLTSASCEDLCRVVASKPSLQELDLGMNKLGDQGIATLCPTLLHPSCQIRVLWLWNCDITTAGCRDLCRVLRAKPSLKELSLAGNALGDEGARLLCESLLEPGCQLESLWVKSCSFTAASCQHFSSMLTRNKCLVELQLSNNKLGDCGVQQLCQGLSQPGAALQVLWLGDCDVGHSGCASLASVLLVNRSLRELDLSNNCMGEEGILRLMESVEQPGCVLEQLVLYDIYWSEEMDRRLRALEERKPSLRVIF

SEQ ID NO: 423 - DNA, 1404 bp, synthetic construct
  misc_feature 1..1404: note = Variant of RNase inhibitor
  source 1..1404: mol_type = other DNA
atgcaccatcatcatcatcatggcggtagcggcacgatgtctctggatattcagtgtcaacaattgtcagatgcgcgttggacggaactgttaccgcttctgcaacagagcgaagtggtgcgcctggatgactgcggcctcactgagatgcgctgcaaagacatcagtagtgcactgcaagccaacccatcgttgaccgaattaagcctgtgtacaaatgagctgggtgatgctggagttcatttagtcctgcagggcttgcagtctcctacctgcaagattgaaaaactgtccctccagaactgttgtctgacgaagactggttgcggtgtattaggcgacatgcttcgttcaatgcccaccctgcgcgaactgtatctgaatgataacccgttgggcgatgcgggcctccagctgctttgctccgggctggtggacccgcaatgtcacctggagaaactgcaggtggaatactgcaatctcacagcagcctcgtgcgaaagcttggcgagcgctctgcgtgccaaacgccattttaaagaattagcggtttcgaacaacgaactgggtgaagcaggcgtgcgcgtactttgtcgtgggctggtggatagtttgtgccaactggaggttctgaaactggaaaattgtggattgacctctgcctcctgcgaggatctttgtcgtgtggtcgctagcaaaccaagcctccaggaattggaccttggcatgaacaaattaggtgaccaaggcatcgcaacgttatgcccgaccctgcttcacccttcatgccagattcgtgttttgtggctctggaactgtgatatcaccaccgccggctgccgcgacctctgtcgtgtattacgcgcgaagccgtccctcaaagagctgagtcttgcgggtaatgccttgggagatgaaggcgcacgtctcttgtgcgaatcgttattagaaccggcgtgccagctcgaaagcctttgggtgaaaagctgttctttcactgctgcttcatgccagcattttagttcgatgttgacgcgcaacaagtgtcttgttgagctccaattgagcaataataaattaggtgattgtggcgtgcagcagctttgccaagggttatctcaaccaggtgcggccctccaggttttgtggttgggcgactgtgatgtaggtcatagtggctgtgcaagcttagcttccgtgttgcttgtcaaccgttccttacgcgaactcgaccttagtaacaactgcatgggcgaagaagggattctccgtttgatggagagcgttgaacaaccgggatgcgtgcttgaacagttggtcctctatgacatctactggtcggaggagatggatcgtcgtttacgtgccttagaagagcgcaaaccgtcattgcgcgtgattttc

SEQ ID NO: 424 - protein, 468 aa, synthetic construct
  REGION 1..468: note = Variant of RNase inhibitor
MHHHHHHGGSGTMSLDIQCQQLSDARWTELLPLLQQSEVVRLDDCGLTEMRCKDISSALQANPSLTELSLCTNELGDAGVHLVLQGLQSPTCKIEKLSLQNCCLTKTGCGVLGDMLRSMPTLRELYLNDNPLGDAGLQLLCSGLVDPQCHLEKLQVEYCNLTAASCESLASALRAKRHFKELAVSNNELGEAGVRVLCRGLVDSLCQLEVLKLENCGLTSASCEDLCRVVASKPSLQELDLGMNKLGDQGIATLCPTLLHPSCQIRVLWLWNCDITTAGCRDLCRVLRAKPSLKELSLAGNALGDEGARLLCESLLEPACQLESLWVKSCSFTAASCQHFSSMLTRNKCLVELQLSNNKLGDCGVQQLCQGLSQPGAALQVLWLGDCDVGHSGCASLASVLLVNRSLRELDLSNNCMGEEGILRLMESVEQPGCVLEQLVLYDIYWSEEMDRRLRALEERKPSLRVIF

SEQ ID NO: 425 - DNA, 1404 bp, synthetic construct
  misc_feature 1..1404: note = Variant of RNase inhibitor
  source 1..1404: mol_type = other DNA
atgcaccatcatcatcatcatggcggtagcggcacgatgtctctggatattcagtgtcaacaattgtcagatgcgcgttggacggaactgttaccgcttctgcaacagagcgaagtggtgcgcctggatgactgcggcctcactgagatgcgctgcaaagacatcagtagtgcactgcaagccaacccatcgttgaccgaattaagcctgtgtacaaatgagctgggtgatgctggagttcatttagtcctgcagggcttgcagtctcctacctgcaagattgaaaaactgtccctccagaactgttgtctgacgaagactggttgcggtgtattaggcgacatgcttcgttcaatgcccaccctgcgcgaactgtatctgaatgataacccgttgggcgatgcgggcctccagctgctttgctccgggctggtggacccgcaatgtcacctggagaaactgcaggtggaatactgcaatctcacagcagcctcgtgcgaaagcttggcgagcgctctgcgtgccaaacgccattttaaagaattagcggtttcgaacaacgaactgggtgaagcaggcgtgcgcgtactttgtcgtgggctggtggatagtatttgccaactggaggttctgaaactggaaaattgtggattgacctctgcctcctgcgaggatctttgtcgtgtggtcgctagcaaaccaagcctccaggaattggaccttggcatgaacaaattaggtgaccaaggcatcgcaacgttatgcccgaccctgcttcacccttcatgccagattcgtgttttgtggctctggaactgtgatatcaccaccgccggctgccgcgacctctgtcgtgtattacgcgcgaagccgtccctcaaagagctgagtcttgcgggtaatgccttgggagatgaaggcgcacgtctcttgtgcgaatcgttattagaaccggcgtgccagctcgaaagcctttgggtgaaaagctgttctttcactgctgcttcatgccagcattttagttcgatgttgacgcgcaacaagtgtcttgttgagctccaattgagcaataataaattaggtgattgtggcgtgcagcagctttgccaagggttatctcaaccaggtgcggccctccaggttttgtggttgggcgactgtgatgtaggtcatagtggctgtgcaagcttagcttccgtgttgcttgtcaaccgttccttacgcgaactcgaccttagtaacaactgcatgggcgaagaagggattctccgtttgatggagagcgttgaacaaccgggatgcgtgcttgaacagttggtcctctatgacatctactggtcggaggagatggatcgtcgtttacgtgccttagaagagcgcaaaccgtcattgcgcgtgattttc

SEQ ID NO: 426 - protein, 468 aa, synthetic construct
  REGION 1..468: note = Variant of RNase inhibitor
MHHHHHHGGSGTMSLDIQCQQLSDARWTELLPLLQQSEVVRLDDCGLTEMRCKDISSALQANPSLTELSLCTNELGDAGVHLVLQGLQSPTCKIEKLSLQNCCLTKTGCGVLGDMLRSMPTLRELYLNDNPLGDAGLQLLCSGLVDPQCHLEKLQVEYCNLTAASCESLASALRAKRHFKELAVSNNELGEAGVRVLCRGLVDSICQLEVLKLENCGLTSASCEDLCRVVASKPSLQELDLGMNKLGDQGIATLCPTLLHPSCQIRVLWLWNCDITTAGCRDLCRVLRAKPSLKELSLAGNALGDEGARLLCESLLEPACQLESLWVKSCSFTAASCQHFSSMLTRNKCLVELQLSNNKLGDCGVQQLCQGLSQPGAALQVLWLGDCDVGHSGCASLASVLLVNRSLRELDLSNNCMGEEGILRLMESVEQPGCVLEQLVLYDIYWSEEMDRRLRALEERKPSLRVIF

SEQ ID NO: 427 - DNA, 1404 bp, synthetic construct
  misc_feature 1..1404: note = Variant of RNase inhibitor
  source 1..1404: mol_type = other DNA
atgcaccatcatcatcatcatggcggtagcggcacgatgtctctggatattcagtgtcaacaattgtcagatgcgcgttggacggaactgttaccgcttctgcaacagagcgaagtggtgcgcctggatgactgcggcctcactgagatgcgctgcaaagacatcagtagtgcactgcaagccaacccatcgttgaccgaattaagcctgtgtacaaatgagctgggtgatgctggagttcatttagtcctgcagggcttgcagtctcctacctgcaagattgaaaaactgtccctccagaactgttgtctgacgaagactggttgcggtgtattaggcgacatgcttcgttcaatgcccaccctgcgcgaactgtatctgaatgataacccgttgggcgatgcgggcctccagctgctttgctccgggctggtggacccgcaatgtcacctggagaaactgcaggtggaatactgcaatctcacagcagcctcgtgcgaaagcttggcgagcgctctgcgtgccaaacgccattttaaagaattagcggtttcgaacaacgaactgggtgaagcaggcgtgcgcgtactttgtcgtgggctggtggatagtgtttgccaactggaggttctgaaactggaaaattgtggattgacctctgcctcctgcgaggatctttgtcgtgtggtcgctagcaaaccaagcctccaggaattggaccttggcatgaacaaattaggtgaccaaggcatcgcaacgttatgcccgaccctgcttcacccttcatgccagattcgtgttttgtggctctggaactgtgatatcaccaccgccggctgccgcgacctctgtcgtgtattacgcgcgaagccgtccctcaaagagctgagtcttgcgggtaatgccttgggagatgaaggcgcacgtctcttgtgcgaatcgttattagaaccggcgtgccagctcgaaagcctttgggtgaaaagctgttctttcactgctgcttcatgccagcattttagttcgatgttgacgcgcaacaagtgtcttgttgagctccaattgagcaataataaattaggtgattgtggcgtgcagcagctttgccaagggttatctcaaccaggtgcggccctccaggttttgtggttgggcgactgtgatgtaggtcatagtggctgtgcaagcttagcttccgtgttgcttgtcaaccgttccttacgcgaactcgaccttagtaacaactgcatgggcgaagaagggattctccgtttgatggagagcgttgaacaaccgggatgcgtgcttgaacagttggtcctctatgacatctactggtcggaggagatggatcgtcgtttacgtgccttagaagagcgcaaaccgtcattgcgcgtgattttc

SEQ ID NO: 428 - protein, 468 aa, synthetic construct
  REGION 1..468: note = Variant of RNase inhibitor
MHHHHHHGGSGTMSLDIQCQQLSDARWTELLPLLQQSEVVRLDDCGLTEMRCKDISSALQANPSLTELSLCTNELGDAGVHLVLQGLQSPTCKIEKLSLQNCCLTKTGCGVLGDMLRSMPTLRELYLNDNPLGDAGLQLLCSGLVDPQCHLEKLQVEYCNLTAASCESLASALRAKRHFKELAVSNNELGEAGVRVLCRGLVDSVCQLEVLKLENCGLTSASCEDLCRVVASKPSLQELDLGMNKLGDQGIATLCPTLLHPSCQIRVLWLWNCDITTAGCRDLCRVLRAKPSLKELSLAGNALGDEGARLLCESLLEPACQLESLWVKSCSFTAASCQHFSSMLTRNKCLVELQLSNNKLGDCGVQQLCQGLSQPGAALQVLWLGDCDVGHSGCASLASVLLVNRSLRELDLSNNCMGEEGILRLMESVEQPGCVLEQLVLYDIYWSEEMDRRLRALEERKPSLRVIF

SEQ ID NO: 429 - DNA, 1404 bp, synthetic construct
  misc_feature 1..1404: note = Variant of RNase inhibitor
  source 1..1404: mol_type = other DNA
atgcaccatcatcatcatcatggcggtagcggcacgatgtctctggatattcagtgtcaacaattgtcagatgcgcgttggacggaactgttaccgcttctgaggcagagcgaagtggtgcgcctggatgactgcggcctcactgagatgcgctgcaaagacatcagtagtgcactgcaagccaacccatcgttgaccgaattaagcctgtgtacaaatgagctgggtgatgctggagttcatttagtcctgcagggcttgcagtctcctacctgcaagattgaaaaactgtccctccagaactgttgtctgacgaagactggttgcggtgtattaggcgacatgcttcgttcaatgcccaccctgcgcgaactgtatctgaatgataacccgttgggcgatgcgggcctccagctgctttgctccgggctggtggacccgcaatgtcacctggagaaactgcaggtggaatactgcaatctcacagcagcctcgtgcgaaagcttggcgagcgctctgcgtgccaaacgccattttaaagaattagcggtttcgaacaacgaactgggtgaagcaggcgtgcgcgtactttgtcgtgggctggtggatagtgcgtgccaactggaggttctgaaactggaaaattgtggattgacctctgcctcctgcgaggatctttgtcgtgtggtcgctagcaaaccaagcctccaggaattggaccttggcatgaacaaattaggtgaccaaggcatcgcaacgttatgcccgaccctgcttcacccttcatgccagattcgtgttttgtggctctggaactgtgatatcaccaccgccggctgccgcgacctctgtcgtgtattacgcgcgaagccgtccctcaaagagctgagtcttgcgggtaatgccttgggagatgaaggcgcacgtctcttgtgcgaatcgttattagaaccggcgtgccagctcgaaagcctttgggtgaaaagctgttctttcactgctgcttcatgccagcattttagttcgatgttgacgcgcaacaagtgtcttgttgagctccaattgagcaataataaattaggtgattgtggcgtgcagcagctttgccaagggttatctcaaccaggtgcggccctccaggttttgtggttgggcgactgtgatgtaggtcatagtggctgtgcaagcttagcttccgtgttgcttgtcaaccgttccttacgcgaactcgaccttagtaacaactgcatgggcgaagaagggattctccgtttgatggagagcgttgaacaaccgggatgcgtgcttgaacagttggtcctctatgacatctactggtcggaggagatggatcgtcgtttacgtgccttagaagagcgcaaaccgtcattgcgcgtgattttc

SEQ ID NO: 430 - protein, 468 aa, synthetic construct
  REGION 1..468: note = Variant of RNase inhibitor
MHHHHHHGGSGTMSLDIQCQQLSDARWTELLPLLRQSEVVRLDDCGLTEMRCKDISSALQANPSLTELSLCTNELGDAGVHLVLQGLQSPTCKIEKLSLQNCCLTKTGCGVLGDMLRSMPTLRELYLNDNPLGDAGLQLLCSGLVDPQCHLEKLQVEYCNLTAASCESLASALRAKRHFKELAVSNNELGEAGVRVLCRGLVDSACQLEVLKLENCGLTSASCEDLCRVVASKPSLQELDLGMNKLGDQGIATLCPTLLHPSCQIRVLWLWNCDITTAGCRDLCRVLRAKPSLKELSLAGNALGDEGARLLCESLLEPACQLESLWVKSCSFTAASCQHFSSMLTRNKCLVELQLSNNKLGDCGVQQLCQGLSQPGAALQVLWLGDCDVGHSGCASLASVLLVNRSLRELDLSNNCMGEEGILRLMESVEQPGCVLEQLVLYDIYWSEEMDRRLRALEERKPSLRVIF

SEQ ID NO: 431 - DNA, 1404 bp, synthetic construct
  misc_feature 1..1404: note = Variant of RNase inhibitor
  source 1..1404: mol_type = other DNA
atgcaccatcatcatcatcatggcggtagcggcacgatgtctctggatattcagtgtcaacaattgtcagatgcgcgttggacggaactgttaccgcttctgcaacagagcgaagtggtgcgcctggatgactgcggcctcactgagatgcgctgcaaagacatcagtagtgcactgcaagccaacccatcgttgaccgaattaagcctgtgtacaaatgagctgggtgataagggagttcatttagtcctgcagggcttgcagtctcctacctgcaagattgaaaaactgtccctccagaactgttgtctgacgaagactggttgcggtgtattaggcgacatgcttcgttcaatgcccaccctgcgcgaactgtatctgaatgataacccgttgggcgatgcgggcctccagctgctttgctccgggctggtggacccgcaatgtcacctggagaaactgcaggtggaatactgcaatctcacagcagcctcgtgcgaaagcttggcgagcgctctgcgtgccaaacgccattttaaagaattagcggtttcgaacaacgaactgggtgaagcaggcgtgcgcgtactttgtcgtgggctggtggatagtgcgtgccaactggaggttctgaaactggaaaattgtggattgacctctgcctcctgcgaggatctttgtcgtgtggtcgctagcaaaccaagcctccaggaattggaccttggcatgaacaaattaggtgaccaaggcatcgcaacgttatgcccgaccctgcttcacccttcatgccagattcgtgttttgtggctctggaactgtgatatcaccaccgccggctgccgcgacctctgtcgtgtattacgcgcgaagccgtccctcaaagagctgagtcttgcgggtaatgccttgggagatgaaggcgcacgtctcttgtgcgaatcgttattagaaccggcgtgccagctcgaaagcctttgggtgaaaagctgttctttcactgctgcttcatgccagcattttagttcgatgttgacgcgcaacaagtgtcttgttgagctccaattgagcaataataaattaggtgattgtggcgtgcagcagctttgccaagggttatctcaaccaggtgcggccctccaggttttgtggttgggcgactgtgatgtaggtcatagtggctgtgcaagcttagcttccgtgttgcttgtcaaccgttccttacgcgaactcgaccttagtaacaactgcatgggcgaagaagggattctccgtttgatggagagcgttgaacaaccgggatgcgtgcttgaacagttggtcctctatgacatctactggtcggaggagatggatcgtcgtttacgtgccttagaagagcgcaaaccgtcattgcgcgtgattttc

SEQ ID NO: 432 - protein, 468 aa, synthetic construct
  REGION 1..468: note = Variant of RNase inhibitor
MHHHHHHGGSGTMSLDIQCQQLSDARWTELLPLLQQSEVVRLDDCGLTEMRCKDISSALQANPSLTELSLCTNELGDKGVHLVLQGLQSPTCKIEKLSLQNCCLTKTGCGVLGDMLRSMPTLRELYLNDNPLGDAGLQLLCSGLVDPQCHLEKLQVEYCNLTAASCESLASALRAKRHFKELAVSNNELGEAGVRVLCRGLVDSACQLEVLKLENCGLTSASCEDLCRVVASKPSLQELDLGMNKLGDQGIATLCPTLLHPSCQIRVLWLWNCDITTAGCRDLCRVLRAKPSLKELSLAGNALGDEGARLLCESLLEPACQLESLWVKSCSFTAASCQHFSSMLTRNKCLVELQLSNNKLGDCGVQQLCQGLSQPGAALQVLWLGDCDVGHSGCASLASVLLVNRSLRELDLSNNCMGEEGILRLMESVEQPGCVLEQLVLYDIYWSEEMDRRLRALEERKPSLRVIF

SEQ ID NO: 433 - DNA, 1404 bp, synthetic construct
  misc_feature 1..1404: note = Variant of RNase inhibitor
  source 1..1404: mol_type = other DNA
atgcaccatcatcatcatcatggcggtagcggcacgatgtctctggatattcagtgtcaacaattgtcagatgcgcgttggacggaactgttaccgcttctgcaacagagcgaagtggtgcgcctggatgactgcggcctcactgagatgcgctgcaaagacatcagtagtgcactgcaagccaacccatcgttgaccgaattaagcctgtgtacaaatgagctgggtgatgctggagttcatttagtcctgcagggcttgcagtctcctacctgcaagattgaaaaactgtccctccagaactgttgtctgacgaagactggttgcggtgtattaggcgacatgcttcgttcaatgcccaccctgcgcgaactgtatctgaatgataacccgttgggcgatgcgggcctccagctgctttgctccgggctggtggacccgcaatgtcacctggagaaactgcaggtggaatactgcaatctcacagcagcctcgtgcgaaagcttggcgagcgctctgcgtgccaaacgccattttaaagaattagcggtttcgaacaacgaactgggtgaagcaggcgtgcgcgtactttgtcgtgggctggtggatagtgcgtgccaactggaggttctgaaactggaaaattgtggattgacctctgcctcctgcgaggatctttgtcttgtggtcgctagcaaaccaagcctccaggaattggaccttggcatgaacaaattaggtgaccaaggcatcgcaacgttatgcccgaccctgcttcacccttcatgccagattcgtgttttgtggctctggaactgtgatatcaccaccgccggctgccgcgacctctgtcgtgtattacgcgcgaagccgtccctcaaagagctgagtcttgcgggtaatgccttgggagatgaaggcgcacgtctcttgtgcgaatcgttattagaaccggcgtgccagctcgaaagcctttgggtgaaaagctgttctttcactgctgcttcatgccagcattttagttcgatgttgacgcgcaacaagtgtcttgttgagctccaattgagcaataataaattaggtgattgtggcgtgcagcagctttgccaagggttatctcaaccaggtgcggccctccaggttttgtggttgggcgactgtgatgtaggtcatagtggctgtgcaagcttagcttccgtgttgcttgtcaaccgttccttacgcgaactcgaccttagtaacaactgcatgggcgaagaagggattctccgtttgatggagagcgttgaacaaccgggatgcgtgcttgaacagttggtcctctatgacatctactggtcggaggagatggatcgtcgtttacgtgccttagaagagcgcaaaccgtcattgcgcgtgattttc

SEQ ID NO: 434 - protein, 468 aa, synthetic construct
  REGION 1..468: note = Variant of RNase inhibitor
MHHHHHHGGSGTMSLDIQCQQLSDARWTELLPLLQQSEVVRLDDCGLTEMRCKDISSALQANPSLTELSLCTNELGDAGVHLVLQGLQSPTCKIEKLSLQNCCLTKTGCGVLGDMLRSMPTLRELYLNDNPLGDAGLQLLCSGLVDPQCHLEKLQVEYCNLTAASCESLASALRAKRHFKELAVSNNELGEAGVRVLCRGLVDSACQLEVLKLENCGLTSASCEDLCLVVASKPSLQELDLGMNKLGDQGIATLCPTLLHPSCQIRVLWLWNCDITTAGCRDLCRVLRAKPSLKELSLAGNALGDEGARLLCESLLEPACQLESLWVKSCSFTAASCQHFSSMLTRNKCLVELQLSNNKLGDCGVQQLCQGLSQPGAALQVLWLGDCDVGHSGCASLASVLLVNRSLRELDLSNNCMGEEGILRLMESVEQPGCVLEQLVLYDIYWSEEMDRRLRALEERKPSLRVIF

SEQ ID NO: 435 - DNA, 1404 bp, synthetic construct
  misc_feature 1..1404: note = Variant of RNase inhibitor
  source 1..1404: mol_type = other DNA
atgcaccatcatcatcatcatggcggtagcggcacgatgtctctggatattcagtgtcaacaattgtcagatgcgcgttggacggaactgttaccgcttctgcaacagagcgaagtggtgcgcctggatgactgcggcctcactgagatgcgctgcaaagacatcagtagtgcactgcaagccaacccatcgttgaccgaattaagcctgtgtacaaatgagctgggtgatgctggagttcatttagtcctgcagggcttgcagtctcctacctgcaagattgaaaaactgtccctccagaactgttgtctgacgaagactggttgcggtgtattaggcgacatgcttcgttcaatgcccaccctgcgcgaactgtatctgaatgataacccgttgggcgatgcgggcctccagctgctttgctccgggctggtggacccgcaatgtcacctggagaaactgcaggtggaatactgcaatctcacagcagcctcgtgcgaaagcttggcgagcgctctgcgtgccaaacgcgattttaaagaattagcggtttcgaacaacgaactgggtgaagcaggcgtgcgcgtactttgtcgtgggctggtggatagtgcgtgccaactggaggttctgaaactggaaaattgtggattgacctctgcctcctgcgaggatctttgtcgtgtggtcgctagcaaaccaagcctccaggaattggaccttggcatgaacaaattaggtgaccaaggcatcgcaacgttatgcccgaccctgcttcacccttcatgccagattcgtgttttgtggctctggaactgtgatatcaccaccgccggctgccgcgacctctgtcgtgtattacgcgcgaagccgtccctcaaagagctgagtcttgcgggtaatgccttgggagatgaaggcgcacgtctcttgtgcgaatcgttattagaaccggcgtgccagctcgaaagcctttgggtgaaaagctgttctttcactgctgcttcatgccagcattttagttcgatgttgacgcgcaacaagtgtcttgttgagctccaattgagcaataataaattaggtgattgtggcgtgcagcagctttgccaagggttatctcaaccaggtgcggccctccaggttttgtggttgggcgactgtgatgtaggtcatagtggctgtgcaagcttagcttccgtgttgcttgtcaaccgttccttacgcgaactcgaccttagtaacaactgcatgggcgaagaagggattctccgtttgatggagagcgttgaacaaccgggatgcgtgcttgaacagttggtcctctatgacatctactggtcggaggagatggatcgtcgtttacgtgccttagaagagcgcaaaccgtcattgcgcgtgattttc

SEQ ID NO: 436 - protein, 468 aa, synthetic construct
  REGION 1..468: note = Variant of RNase inhibitor
MHHHHHHGGSGTMSLDIQCQQLSDARWTELLPLLQQSEVVRLDDCGLTEMRCKDISSALQANPSLTELSLCTNELGDAGVHLVLQGLQSPTCKIEKLSLQNCCLTKTGCGVLGDMLRSMPTLRELYLNDNPLGDAGLQLLCSGLVDPQCHLEKLQVEYCNLTAASCESLASALRAKRDFKELAVSNNELGEAGVRVLCRGLVDSACQLEVLKLENCGLTSASCEDLCRVVASKPSLQELDLGMNKLGDQGIATLCPTLLHPSCQIRVLWLWNCDITTAGCRDLCRVLRAKPSLKELSLAGNALGDEGARLLCESLLEPACQLESLWVKSCSFTAASCQHFSSMLTRNKCLVELQLSNNKLGDCGVQQLCQGLSQPGAALQVLWLGDCDVGHSGCASLASVLLVNRSLRELDLSNNCMGEEGILRLMESVEQPGCVLEQLVLYDIYWSEEMDRRLRALEERKPSLRVIF

SEQ ID NO: 437 - DNA, 1404 bp, synthetic construct
  misc_feature 1..1404: note = Variant of RNase inhibitor
  source 1..1404: mol_type = other DNA
atgcaccatcatcatcatcatggcggtagcggcacgatgtctctggatattcagtgtcaacaattgtcagatgcgcgttggacggaactgttaccgcttctgcaacagagcgaagtggtgcgcctggatgactgcggcctcactgagatgcgctgcaaagacatcagtagtgcactgcaagccaacccatcgttgaccgaattaagcctgtgtacaaatgagctgggtgatgctggagttcatttagtcctgcagggcttgcagtctcctacctgcaagattgaaaaactgtccctccagaactgttgtctgacgaagactggttgcggtgtattaggcgacatgcttcgttcaatgcccaccctgcgcgaactgtatctgaatgataacccgttgggcgatgcgggcctccagctgctttgctccgggctggtggacccgcaatgtcacctggagaaactgcaggtggaatactgcaatctcacagcagcctcgtgcgaaagcttggcgagcgctctgcgtgccaaacgccattttaaagaattagcggtttcgaacaacgaactgggtgaagcaggcgtgcgcgtactttgtcgtgggctggtggatagtgcgtgccaactggaggttctgaaactggaaaattgtggattgacctctgcctcctgcgaggatctttgtcgtgtggtcgctagcaaaccaagcctccaggaattggaccttggcatgaacaaattaggtgaccaaggcatcgcaacgttatgcccgaccctgcttcacccttcatgccagattcgtgttttgtggctctggaactgtgatatcaccaccgccggctgccgcgacctctgtaaggtattacgcgcgaagccgtccctcaaagagctgagtcttgcgggtaatgccttgggagatgaaggcgcacgtctcttgtgcgaatcgttattagaaccggcgtgccagctcgaaagcctttgggtgaaaagctgttctttcactgctgcttcatgccagcattttagttcgatgttgacgcgcaacaagtgtcttgttgagctccaattgagcaataataaattaggtgattgtggcgtgcagcagctttgccaagggttatctcaaccaggtgcggccctccaggttttgtggttgggcgactgtgatgtaggtcatagtggctgtgcaagcttagcttccgtgttgcttgtcaaccgttccttacgcgaactcgaccttagtaacaactgcatgggcgaagaagggattctccgtttgatggagagcgttgaacaaccgggatgcgtgcttgaacagttggtcctctatgacatctactggtcggaggagatggatcgtcgtttacgtgccttagaagagcgcaaaccgtcattgcgcgtgattttc

SEQ ID NO: 438 - protein, 468 aa, synthetic construct
  REGION 1..468: note = Variant of RNase inhibitor
MHHHHHHGGSGTMSLDIQCQQLSDARWTELLPLLQQSEVVRLDDCGLTEMRCKDISSALQANPSLTELSLCTNELGDAGVHLVLQGLQSPTCKIEKLSLQNCCLTKTGCGVLGDMLRSMPTLRELYLNDNPLGDAGLQLLCSGLVDPQCHLEKLQVEYCNLTAASCESLASALRAKRHFKELAVSNNELGEAGVRVLCRGLVDSACQLEVLKLENCGLTSASCEDLCRVVASKPSLQELDLGMNKLGDQGIATLCPTLLHPSCQIRVLWLWNCDITTAGCRDLCKVLRAKPSLKELSLAGNALGDEGARLLCESLLEPACQLESLWVKSCSFTAASCQHFSSMLTRNKCLVELQLSNNKLGDCGVQQLCQGLSQPGAALQVLWLGDCDVGHSGCASLASVLLVNRSLRELDLSNNCMGEEGILRLMESVEQPGCVLEQLVLYDIYWSEEMDRRLRALEERKPSLRVIF

SEQ ID NO: 439 - DNA, 1404 bp, synthetic construct
  misc_feature 1..1404: note = Variant of RNase inhibitor
  source 1..1404: mol_type = other DNA
atgcaccatcatcatcatcatggcggtagcggcacgatgtctctggatattcagtgtcaacaattgtcagatgcgcgttggacggaactgttaccgcttctgcaacaggcggaagtggtgcgcctggatgactgcggcctcactgagatgcgctgcaaagacatcagtagtgcactgcaagccaacccatcgttgaccgaattaagcctgtgtacaaatgagctgggtgatgctggagttcatttagtcctgcagggcttgcagtctcctacctgcaagattgaaaaactgtccctccagaactgttgtctgacgaagactggttgcggtgtattaggcgacatgcttcgttcaatgcccaccctgcgcgaactgtatctgaatgataacccgttgggcgatgcgggcctccagctgctttgccaagggctggtggacccaaattgtcacctggagaaactgcaggtggaatactgcaatctcacagcagcctcgtgcgaaagcttggcgagcgctctgcgtgccaaacgccattttaaagaattagcggtttcgaacaacgaactgggtgaagcaggcgtgcgcgtactttgtcgtgggctggtggagagtccatgccaactggaggttctgaaactggaaaattgtggattgacctctgcctcctgcgaggatctttgtcgtgtggtcgctagcaaaccaagcctccaggaattggaccttggcatgaacaaattaggtgaccaaggcatcgcaacgttatgcccgaccctgcttcacccttcatgccagattcgtgttttgtggctctggaactgtgatatcaccaccgccggctgccgcgacctctgtcaggtattacgcgcgaagccgtccctcaaagagctgagtcttgcgggtaatgccttgggagatgaaggcgcacgtctcttgtgcgaatcgttattagaaccgggctgccagctcgaaagcctttgggtgaaaagctgttctttcactgctgcttcatgccagcattttagttcgatgttgacgcgcaacaagtgtcttgttgagctccaattgagcaataataaattaggtgattgtggcgtgcagcagctttgccaagggttatctcaaccaggtgcggccctccaggttttgtggttgggcgactgtgatgtaggtcatagtggctgtgcaagcttagcttccgtgttgcttgtcaaccgttccttacgcgaactcgaccttagtaacaactgcatgggcgaagaagggattctccgtttgatggagagcgttgaacaaccgggatgcgtgcttgaacagttggtcctctatgacatctactggtcggaggagatggatcgtcgtttacgtgccttagaagagcgcaaaccgtcattgcgcgtgattttc

SEQ ID NO: 440 - protein, 468 aa, synthetic construct
  REGION 1..468: note = Variant of RNase inhibitor
MHHHHHHGGSGTMSLDIQCQQLSDARWTELLPLLQQAEVVRLDDCGLTEMRCKDISSALQANPSLTELSLCTNELGDAGVHLVLQGLQSPTCKIEKLSLQNCCLTKTGCGVLGDMLRSMPTLRELYLNDNPLGDAGLQLLCQGLVDPNCHLEKLQVEYCNLTAASCESLASALRAKRHFKELAVSNNELGEAGVRVLCRGLVESPCQLEVLKLENCGLTSASCEDLCRVVASKPSLQELDLGMNKLGDQGIATLCPTLLHPSCQIRVLWLWNCDITTAGCRDLCQVLRAKPSLKELSLAGNALGDEGARLLCESLLEPGCQLESLWVKSCSFTAASCQHFSSMLTRNKCLVELQLSNNKLGDCGVQQLCQGLSQPGAALQVLWLGDCDVGHSGCASLASVLLVNRSLRELDLSNNCMGEEGILRLMESVEQPGCVLEQLVLYDIYWSEEMDRRLRALEERKPSLRVIF

SEQ ID NO: 441 - DNA, 1404 bp, synthetic construct
  misc_feature 1..1404: note = Variant of RNase inhibitor
  source 1..1404: mol_type = other DNA
atgcaccatcatcatcatcatggcggtagcggcacgatgtctctggatattcagtgtcaacaattgtcagatgcgcgttggactgaactgttaccgcttctgcaacagagcgaagtggtgcgcctggatgactgcggcctcactgagagtcgctgcaaagacatcagtagtgcactgcaagccaacccatcgttgaccgaattaagcctgtgtacaaatgagctgggtgatgctggagttaccttagtcctgcagggcttgcagtctggcacgtgcaagattgaaaaactgtccctccagaactgttgtctgacgaagactggttgcggtgtattaggcgacatgcttcgttcaatgcccaccctgcgcgcactgtatctgaatgataacccgttgggcgatgcgggcctccagctgctttgctccgggctggtggacgaaaattgtcacctggagaaactgcaggtggaatactgcaatctcacagcagcctcgtgcgaaagcttggcgagcgctctgcgtgccaaacgccattttaaagaattagcggtttcgaacaacgaactgggtgaagcaggcgtgcgcgtactttgtcgtgggctggtggagagtccatgccaactggaggttctgaaactggaaaattgtggattgacctctgcctcctgcgaggatctttgtcgtgtggtcgctagcaaaccaagcctccaggaattggaccttggcatgaacaaattaggtgaccaaggcatcgcaacgttatgcccgaccctgcttcacccttcatgccagattcgtgttttgtggctctggaactgtgatatcaccaccgccggctgccgcgacctctgtcaggtattacgcgcgaagccgtccctcaaagagctgagtcttgcgggtaatgccttgggagatgaaggcgcacgtctcttgtgcgaatcgttattagaaccggcctgccagctcgaaagcctttgggtgaaaagctgttctttcactgctgcttcatgccagcattttagttcgatgttgacgcgcaacaagtgtcttgttgagctccaattgagcaataataaattaggtgattgtggcgtgcagcagctttgccaagggttatctcaaccaggtgcggccctccaggttttgtggttgggcgactgtgatgtaggtcatagtggctgtgcaagcttagcttccgtgttgcttgtcaaccgttccttacgcgaactcgaccttagtaacaactgcatgggcgaagaagggattctccgtttgatggagagcgttgaacaaccgggatgcgtgcttgaacagttggtcctctatgacatctactggtcggaggagatggatcgtcgtttacgtgccttagaagagcgcaaaccgtcattgcgcgtgattttc

SEQ ID NO: 442 - protein, 468 aa, synthetic construct
  REGION 1..468: note = Variant of RNase inhibitor
MHHHHHHGGSGTMSLDIQCQQLSDARWTELLPLLQQSEVVRLDDCGLTESRCKDISSALQANPSLTELSLCTNELGDAGVTLVLQGLQSGTCKIEKLSLQNCCLTKTGCGVLGDMLRSMPTLRALYLNDNPLGDAGLQLLCSGLVDENCHLEKLQVEYCNLTAASCESLASALRAKRHFKELAVSNNELGEAGVRVLCRGLVESPCQLEVLKLENCGLTSASCEDLCRVVASKPSLQELDLGMNKLGDQGIATLCPTLLHPSCQIRVLWLWNCDITTAGCRDLCQVLRAKPSLKELSLAGNALGDEGARLLCESLLEPACQLESLWVKSCSFTAASCQHFSSMLTRNKCLVELQLSNNKLGDCGVQQLCQGLSQPGAALQVLWLGDCDVGHSGCASLASVLLVNRSLRELDLSNNCMGEEGILRLMESVEQPGCVLEQLVLYDIYWSEEMDRRLRALEERKPSLRVIF

SEQ ID NO: 443 - DNA, 1404 bp, synthetic construct
  misc_feature 1..1404: note = Variant of RNase inhibitor
  source 1..1404: mol_type = other DNA
atgcaccatcatcatcatcatggcggtagcggcacgatgtctctggatattcagtgtcaacaattgtcagatgcgcgttggacggaactgttaccgcttctgcaacagagcgaagtggtgcgcctggatgactgcggcctcactgagatgcgctgcaaagacatcagtagtgcactgcaagccaacccatcgttgatcgaattaagcctgtgtacaaatgagctgggtgatgctggagttcatttagtcctgcagggcttgcagtctggcacgtgcaagattgaaaaactgtccctccagaactgttgtctgacgaagactggttgcggtgtattaggcgacatgcttcgttcaatgcccaccctgcgcgaactgtatctgaatgataacccgttgggcgatgcgggcctccagctgctttgctccgggctggtggacccaaattgtcacctggagaaactgcaggtggaatactgcaatctcacagcagcctcgtgcgaaagcttggcgagcgctctgcgtgccaaacgccattttaaagaattagcggtttcgaacaacgaactgggtgaagcaggcgtgcgcgtactttgtcgtgggctggtggatagtgcgtgccaactggaggttctgaaactggaaaattgtggattgacctctgcctcctgcgaggatctttgtcgtgtggtcgctagcaaaccaagcctccaggaattggaccttggcatgaacaaattaggtgaccaaggcatcgcaacgttatgcccgaccctgcttcacccttcatgccagattcgtgttttgtggctctggaactgtgatatcaccaccgccggctgccgcgacctctgtcaggtattacgcgcgaagccgtccctcaaagagctgagtcttgcgggtaatgccttgggagatgaaggcgcacgtctcttgtgcgaatcgttattaagtccgggctgccagctcgaaagcctttgggtgaaaagctgttctttcactgctgcttcatgccagcattttagttcgatgttgacgcgcaacaagtgtcttgttgagctccaattgagcaataataaattaggtgattgtggcgtgcagcagctttgccaagggttatctcaaccaggtgcggccctccaggttttgtggttgggcgactgtgatgtaggtcatagtggctgtgcaagcttagcttccgtgttgcttgtcaaccgttccttacgcgaactcgaccttagtaacaactgcatgggcgaagaagggattctccgtttgatggagagcgttgaacaaccgggatgcgtgcttgaacagttggtcctctatgacatctactggtcggaggagatggatcgtcgtttacgtgccttagaagagcgcaaaccgtcattgcgcgtgattttc

SEQ ID NO: 444 - protein, 468 aa, synthetic construct
  REGION 1..468: note = Variant of RNase inhibitor
MHHHHHHGGSGTMSLDIQCQQLSDARWTELLPLLQQSEVVRLDDCGLTEMRCKDISSALQANPSLIELSLCTNELGDAGVHLVLQGLQSGTCKIEKLSLQNCCLTKTGCGVLGDMLRSMPTLRELYLNDNPLGDAGLQLLCSGLVDPNCHLEKLQVEYCNLTAASCESLASALRAKRHFKELAVSNNELGEAGVRVLCRGLVDSACQLEVLKLENCGLTSASCEDLCRVVASKPSLQELDLGMNKLGDQGIATLCPTLLHPSCQIRVLWLWNCDITTAGCRDLCQVLRAKPSLKELSLAGNALGDEGARLLCESLLSPGCQLESLWVKSCSFTAASCQHFSSMLTRNKCLVELQLSNNKLGDCGVQQLCQGLSQPGAALQVLWLGDCDVGHSGCASLASVLLVNRSLRELDLSNNCMGEEGILRLMESVEQPGCVLEQLVLYDIYWSEEMDRRLRALEERKPSLRVIF

SEQ ID NO: 445 - DNA, 1404 bp, synthetic construct
  misc_feature 1..1404: note = Variant of RNase inhibitor
  source 1..1404: mol_type = other DNA
atgcaccatcatcatcatcatggcggtagcggcacgatgtctctggatattcagtgtcaacaattgtcagatgcgcgttggcacgaactgttaccgcttctgcaacaggcggaagtggtgcgcctggatgactgcggcctcactgagatgcgctgcaaagacatcagtagtgcactgcaagccaacccatcgttgaccgaattaagcctgtgtacaaatgagctgggtgatgctggagttcatttagtcctgcagggcttgcagtctcctaagtgcaagattgaaaaactgtccctccagaactgttgtctgacgaagactggttgcggtgtattaggcgacatgcttcgttcaatgcccaccctgcgcgaactgtatctgaatgataacccgttgggcgatgcgggcctccagctgctttgccaagggctggtggacccgcaatgtcacctggagaaactgcaggtggaatactgcaatctcacagcagcctcgtgcgaaagcttggcgagcgctctgcgtgccaaacgccattttaaagaattagcggtttcgaacaacgaactgggtgaagcaggcgtgcgcgtactttgtcgtgggctggtggatagtccatgccaactggaggttctgaaactggaaaattgtggattgacctctgcctcctgcgaggatctttgtcgtgtggtcgctagcaaaccaagcctccaggaattggaccttggcatgaacaaattaggtgaccaaggcatcgcaacgttatgcccgaccctgcttcacccttcatgccagattcgtgttttgtggctctggaactgtgatatcaccaccgccggctgccgcgacctctgtcaggtattacgcgcgaagccgtccctcaaagagctgagtcttgcgggtaatgccttgggagatgaaggcgcacgtctcttgtgcgaatcgttattagaaccggcctgccagctcgaaagcctttgggtgaaaagctgttctttcactgctgcttcatgccagcattttagttcgatgttgacgcgcaacaagtgtcttgttgagctccaattgagcaataataaattaggtgattgtggcgtgcagcagctttgccaagggttatctcaaccaggtgcggccctccaggttttgtggttgggcgactgtgatgtaggtcatagtggctgtgcaagcttagcttccgtgttgcttgtcaaccgttccttacgcgaactcgaccttagtaacaactgcatgggcgaagaagggattctccgtttgatggagagcgttgaacaaccgggatgcgtgcttgaacagttggtcctctatgacatctactggtcggaggagatggatcgtcgtttacgtgccttagaagagcgcaaaccgtcattgcgcgtgattttc

SEQ ID NO: 446 - protein, 468 aa, synthetic construct
  REGION 1..468: note = Variant of RNase inhibitor
MHHHHHHGGSGTMSLDIQCQQLSDARWHELLPLLQQAEVVRLDDCGLTEMRCKDISSALQANPSLTELSLCTNELGDAGVHLVLQGLQSPKCKIEKLSLQNCCLTKTGCGVLGDMLRSMPTLRELYLNDNPLGDAGLQLLCQGLVDPQCHLEKLQVEYCNLTAASCESLASALRAKRHFKELAVSNNELGEAGVRVLCRGLVDSPCQLEVLKLENCGLTSASCEDLCRVVASKPSLQELDLGMNKLGDQGIATLCPTLLHPSCQIRVLWLWNCDITTAGCRDLCQVLRAKPSLKELSLAGNALGDEGARLLCESLLEPACQLESLWVKSCSFTAASCQHFSSMLTRNKCLVELQLSNNKLGDCGVQQLCQGLSQPGAALQVLWLGDCDVGHSGCASLASVLLVNRSLRELDLSNNCMGEEGILRLMESVEQPGCVLEQLVLYDIYWSEEMDRRLRALEERKPSLRVIF

SEQ ID NO: 447 - DNA, 1404 bp, synthetic construct
  misc_feature 1..1404: note = Variant of RNase inhibitor
  source 1..1404: mol_type = other DNA
atgcaccatcatcatcatcatggcggtagcggcacgatgtctctggatattcagtgtcaacaattgtcagatgcgcgttggacggaactgttaccgcttctgcaacagagcgaagtggtgcgcctggatgactgcggcctcactgagagtcgctgcaaagacatcagtagtgcactgcaagccaacccatcgttgaccgaattaagcctgtgtacaaatgagctgggtgatgctggagttcatttagtcctgcagggcttgcagtctcctaagtgcaagattgaaaaactgtccctccagaactgttgtctgacgaagactggttgcggtgtattaggcgacatgcttcgttcaatgcccaccctgcgcgcactgtatctgaatgataacccgttgggcgatgcgggcctccagctgctttgccaagggctggtggacgaaaattgtcacctggagaaactgcaggtggaatactgcaatctcacagcagcctcgtgcgaaagcttggcgagcgctctgcgtgccaaacgccattttaaagaattagcggtttcgaacaacgaactgggtgaagcaggcgtgcgcgtactttgtcgtgggctggtggagagtccatgccaactggaggttctgaaactggaaaattgtggattgacctctgcctcctgcgaggatctttgtcgtgtggtcgctagcaaaccaagcctccaggaattggaccttggcatgaacaaattaggtgaccaaggcatcgcaacgttatgcccgaccctgcttcacccttcatgccagattcgtgttttgtggctctggaactgtgatatcaccaccgccggctgccgcgacctctgtcgtgtattacgcgcgaagccgtccctcaaagagctgagtcttgcgggtaatgccttgggagatgaaggcgcacgtctcttgtgcgaatcgttattaagtccgggctgccagctcgaaagcctttgggtgaaaagctgttctttcactgctgcttcatgccagcattttagttcgatgttgacgcgcaacaagtgtcttgttgagctccaattgagcaataataaattaggtgattgtggcgtgcagcagctttgccaagggttatctcaaccaggtgcggccctccaggttttgtggttgggcgactgtgatgtaggtcatagtggctgtgcaagcttagcttccgtgttgcttgtcaaccgttccttacgcgaactcgaccttagtaacaactgcatgggcgaagaagggattctccgtttgatggagagcgttgaacaaccgggatgcgtgcttgaacagttggtcctctatgacatctactggtcggaggagatggatcgtcgtttacgtgccttagaagagcgcaaaccgtcattgcgcgtgattttc

SEQ ID NO: 448 - protein, 468 aa, synthetic construct
  REGION 1..468: note = Variant of RNase inhibitor
MHHHHHHGGSGTMSLDIQCQQLSDARWTELLPLLQQSEVVRLDDCGLTESRCKDISSALQANPSLTELSLCTNELGDAGVHLVLQGLQSPKCKIEKLSLQNCCLTKTGCGVLGDMLRSMPTLRALYLNDNPLGDAGLQLLCQGLVDENCHLEKLQVEYCNLTAASCESLASALRAKRHFKELAVSNNELGEAGVRVLCRGLVESPCQLEVLKLENCGLTSASCEDLCRVVASKPSLQELDLGMNKLGDQGIATLCPTLLHPSCQIRVLWLWNCDITTAGCRDLCRVLRAKPSLKELSLAGNALGDEGARLLCESLLSPGCQLESLWVKSCSFTAASCQHFSSMLTRNKCLVELQLSNNKLGDCGVQQLCQGLSQPGAALQVLWLGDCDVGHSGCASLASVLLVNRSLRELDLSNNCMGEEGILRLMESVEQPGCVLEQLVLYDIYWSEEMDRRLRALEERKPSLRVIF

SEQ ID NO: 449 - DNA, 1404 bp, synthetic construct
  misc_feature 1..1404: note = Variant of RNase inhibitor
  source 1..1404: mol_type = other DNA
atgcaccatcatcatcatcatggcggtagcggcacgatgtctctggatattcagtgtcaacaattgtcagatgcgcgttggactgaactgttaccgcttctgcaacagagcgaagtggtgcgcctggatgactgcggcctcactgagagtcgctgcaaagacatcagtagtgcactgcaagccaacccatcgttgatcgaattaagcctgtgtacaaatgagctgggtgatgctggagttcacttagtcctgcagggcttgcagtctggcaagtgcaagattgaaaaactgtccctccagaactgttgtctgacgaagactggttgcggtgtattaggcgacatgcttcgttcaatgcccaccctgcgcgcactgtatctgaatgataacccgttgggcgatgcgggcctccagctgctttgccaagggctggtggacccacaatgtcacctggagaaactgcaggtggaatactgcaatctcacagcagcctcgtgcgaaagcttggcgagcgctctgcgtgccaaacgccattttaaagaattagcggtttcgaacaacgaactgggtgaagcaggcgtgcgcgtactttgtcgtgggctggtggatagtgcatgccaactggaggttctgaaactggaaaattgtggattgacctctgcctcctgcgaggatctttgtcgtgtggtcgctagcaaaccaagcctccaggaattggaccttggcatgaacaaattaggtgaccaaggcatcgcaacgttatgcccgaccctgcttcacccttcatgccagattcgtgttttgtggctctggaactgtgatatcaccaccgccggctgccgcgacctctgtcaggtattacgcgcgaagccgtccctcaaagagctgagtcttgcgggtaatgccttgggagatgaaggcgcacgtctcttgtgcgaatcgttattaagtccggcctgccagctcgaaagcctttgggtgaaaagctgttctttcactgctgcttcatgccagcattttagttcgatgttgacgcgcaacaagtgtcttgttgagctccaattgagcaataataaattaggtgattgtggcgtgcagcagctttgccaagggttatctcaaccaggtgcggccctccaggttttgtggttgggcgactgtgatgtaggtcatagtggctgtgcaagcttagcttccgtgttgcttgtcaaccgttccttacgcgaactcgaccttagtaacaactgcatgggcgaagaagggattctccgtttgatggagagcgttgaacaaccgggatgcgtgcttgaacagttggtcctctatgacatctactggtcggaggagatggatcgtcgtttacgtgccttagaagagcgcaaaccgtcattgcgcgtgattttc

SEQ ID NO: 450 - protein, 468 aa, synthetic construct
  REGION 1..468: note = Variant of RNase inhibitor
MHHHHHHGGSGTMSLDIQCQQLSDARWTELLPLLQQSEVVRLDDCGLTESRCKDISSALQANPSLIELSLCTNELGDAGVHLVLQGLQSGKCKIEKLSLQNCCLTKTGCGVLGDMLRSMPTLRALYLNDNPLGDAGLQLLCQGLVDPQCHLEKLQVEYCNLTAASCESLASALRAKRHFKELAVSNNELGEAGVRVLCRGLVDSACQLEVLKLENCGLTSASCEDLCRVVASKPSLQELDLGMNKLGDQGIATLCPTLLHPSCQIRVLWLWNCDITTAGCRDLCQVLRAKPSLKELSLAGNALGDEGARLLCESLLSPACQLESLWVKSCSFTAASCQHFSSMLTRNKCLVELQLSNNKLGDCGVQQLCQGLSQPGAALQVLWLGDCDVGHSGCASLASVLLVNRSLRELDLSNNCMGEEGILRLMESVEQPGCVLEQLVLYDIYWSEEMDRRLRALEERKPSLRVIF

SEQ ID NO: 451 - DNA, 1404 bp, synthetic construct
  misc_feature 1..1404: note = Variant of RNase inhibitor
  source 1..1404: mol_type = other DNA
atgcaccatcatcatcatcatggcggtagcggcacgatgtctctggatattcagtgtcaacaattgtcagatgcgcgttggactgaactgttaccgcttctgcaacagagcgaagtggtgcgcctggatgactgcggcctcactgagatgcgctgcaaagacatcagtagtgcactgcaagccaacccatcgttgaccgaattaagcctgtgtacaaatgagctgggtgatgctggagttcacttagtcctgcagggcttgcagtctcctacctgcaagattgaaaaactgtccctccagaactgttgtctgacgaagactggttgcggtgtattaggcgacatgcttcgttcaatgcccaccctgcgcgaactgtatctgaatgataacccgttgggcgatgcgggcctccagctgctttgctccgggctggtggacgaaaattgtcacctggagaaactgcaggtggaatactgcaatctcacagcagcctcgtgcgaaagcttggcgagcgctctgcgtgccaaacgccattttaaagaattagcggtttcgaacaacgaactgggtgaagcaggcgtgcgcgtactttgtcgtgggctggtggagagtgcatgccaactggaggttctgaaactggaaaattgtggattgacctctgcctcctgcgaggatctttgtcgtgtggtcgctagcaaaccaagcctccaggaattggaccttggcatgaacaaattaggtgaccaaggcatcgcaacgttatgcccgaccctgcttcacccttcatgccagattcgtgttttgtggctctggaactgtgatatcaccaccgccggctgccgcgacctctgtcaggtattacgcgcgaagccgtccctcaaagagctgagtcttgcgggtaatgccttgggagatgaaggcgcacgtctcttgtgcgaatcgttattaagtccgggctgccagctcgaaagcctttgggtgaaaagctgttctttcactgctgcttcatgccagcattttagttcgatgttgacgcgcaacaagtgtcttgttgagctccaattgagcaataataaattaggtgattgtggcgtgcagcagctttgccaagggttatctcaaccaggtgcggccctccaggttttgtggttgggcgactgtgatgtaggtcatagtggctgtgcaagcttagcttccgtgttgcttgtcaaccgttccttacgcgaactcgaccttagtaacaactgcatgggcgaagaagggattctccgtttgatggagagcgttgaacaaccgggatgcgtgcttgaacagttggtcctctatgacatctactggtcggaggagatggatcgtcgtttacgtgccttagaagagcgcaaaccgtcattgcgcgtgattttc

SEQ ID NO: 452 - protein, 468 aa, synthetic construct
  REGION 1..468: note = Variant of RNase inhibitor
MHHHHHHGGSGTMSLDIQCQQLSDARWTELLPLLQQSEVVRLDDCGLTEMRCKDISSALQANPSLTELSLCTNELGDAGVHLVLQGLQSPTCKIEKLSLQNCCLTKTGCGVLGDMLRSMPTLRELYLNDNPLGDAGLQLLCSGLVDENCHLEKLQVEYCNLTAASCESLASALRAKRHFKELAVSNNELGEAGVRVLCRGLVESACQLEVLKLENCGLTSASCEDLCRVVASKPSLQELDLGMNKLGDQGIATLCPTLLHPSCQIRVLWLWNCDITTAGCRDLCQVLRAKPSLKELSLAGNALGDEGARLLCESLLSPGCQLESLWVKSCSFTAASCQHFSSMLTRNKCLVELQLSNNKLGDCGVQQLCQGLSQPGAALQVLWLGDCDVGHSGCASLASVLLVNRSLRELDLSNNCMGEEGILRLMESVEQPGCVLEQLVLYDIYWSEEMDRRLRALEERKPSLRVIF

SEQ ID NO: 453 - DNA, 1404 bp, synthetic construct
  misc_feature 1..1404: note = Variant of RNase inhibitor
  source 1..1404: mol_type = other DNA
atgcaccatcatcatcatcatggcggtagcggcacgatgtctctggatattcagtgtcaacaattgtcagatgcgcgttggacggaactgttaccgcttctgcaacagagcgaagtggtgcgcctggatgactgcggcctcactgagagtcgctgcaaagacatcagtagtgcactgcaagccaacccatcgttgatcgaattaagcctgtgtacaaatgagctgggtgatgctggagttaccttagtcctgcagggcttgcagtctggcacgtgcaagattgaaaaactgtccctccagaactgttgtctgacgaagactggttgcggtgtattaggcgacatgcttcgttcaatgcccaccctgcgcgaactgtatctgaatgataacccgttgggcgatgcgggcctccagctgctttgctcggggctggtggacccacaatgtcacctggagaaactgcaggtggaatactgcaatctcacagcagcctcgtgcgaaagcttggcgagcgctctgcgtgccaaacgccattttaaagaattagcggtttcgaacaacgaactgggtgaagcaggcgtgcgcgtactttgtcgtgggctggtggatagtccatgccaactggaggttctgaaactggaaaattgtggattgacctctgcctcctgcgaggatctttgtcgtgtggtcgctagcaaaccaagcctccaggaattggaccttggcatgaacaaattaggtgaccaaggcatcgcaacgttatgcccgaccctgcttcacccttcatgccagattcgtgttttgtggctctggaactgtgatatcaccaccgccggctgccgcgacctctgtcgcgtattacgcgcgaagccgtccctcaaagagctgagtcttgcgggtaatgccttgggagatgaaggcgcacgtctcttgtgcgaatcgttattagaaccgggctgccagctcgaaagcctttgggtgaaaagctgttctttcactgctgcttcatgccagcattttagttcgatgttgacgcgcaacaagtgtcttgttgagctccaattgagcaataataaattaggtgattgtggcgtgcagcagctttgccaagggttatctcaaccaggtgcggccctccaggttttgtggttgggcgactgtgatgtaggtcatagtggctgtgcaagcttagcttccgtgttgcttgtcaaccgttccttacgcgaactcgaccttagtaacaactgcatgggcgaagaagggattctccgtttgatggagagcgttgaacaaccgggatgcgtgcttgaacagttggtcctctatgacatctactggtcggaggagatggatcgtcgtttacgtgccttagaagagcgcaaaccgtcattgcgcgtgattttc

SEQ ID NO: 454 - protein, 468 aa, synthetic construct
  REGION 1..468: note = Variant of RNase inhibitor
MHHHHHHGGSGTMSLDIQCQQLSDARWTELLPLLQQSEVVRLDDCGLTESRCKDISSALQANPSLIELSLCTNELGDAGVTLVLQGLQSGTCKIEKLSLQNCCLTKTGCGVLGDMLRSMPTLRELYLNDNPLGDAGLQLLCSGLVDPQCHLEKLQVEYCNLTAASCESLASALRAKRHFKELAVSNNELGEAGVRVLCRGLVDSPCQLEVLKLENCGLTSASCEDLCRVVASKPSLQELDLGMNKLGDQGIATLCPTLLHPSCQIRVLWLWNCDITTAGCRDLCRVLRAKPSLKELSLAGNALGDEGARLLCESLLEPGCQLESLWVKSCSFTAASCQHFSSMLTRNKCLVELQLSNNKLGDCGVQQLCQGLSQPGAALQVLWLGDCDVGHSGCASLASVLLVNRSLRELDLSNNCMGEEGILRLMESVEQPGCVLEQLVLYDIYWSEEMDRRLRALEERKPSLRVIF

SEQ ID NO: 455 - DNA, 1404 bp, synthetic construct
  misc_feature 1..1404: note = Variant of RNase inhibitor
  source 1..1404: mol_type = other DNA
atgcaccatcatcatcatcatggcggtagcggcacgatgtctctggatattcagtgtcaacaattgtcagatgcgcgttggactgaactgttaccgcttctgcaacagagcgaagtggtgcgcctggatgactgcggcctcactgagagtcgctgcaaagacatcagtagtgcactgcaagccaacccatcgttgatcgaattaagcctgtgtacaaatgagctgggtgatgctggagttcatttagtcctgcagggcttgcagtctcctacctgcaagattgaaaaactgtccctccagaactgttgtctgacgaagactggttgcggtgtattaggcgacatgcttcgttcaatgcccaccctgcgcgcactgtatctgaatgataacccgttgggcgatgcgggcctccagctgctttgctccgggctggtggacccgcaatgtcacctggagaaactgcaggtggaatactgcaatctcacagcagcctcgtgcgaaagcttggcgagcgctctgcgtgccaaacgccattttaaagaattagcggtttcgaacaacgaactgggtgaagcaggcgtgcgcgtactttgtcgtgggctggtggagagtccatgccaactggaggttctgaaactggaaaattgtggattgacctctgcctcctgcgaggatctttgtcgtgtggtcgctagcaaaccaagcctccaggaattggaccttggcatgaacaaattaggtgaccaaggcatcgcaacgttatgcccgaccctgcttcacccttcatgccagattcgtgttttgtggctctggaactgtgatatcaccaccgccggctgccgcgacctctgtcgcgtattacgcgcgaagccgtccctcaaagagctgagtcttgcgggtaatgccttgggagatgaaggcgcacgtctcttgtgcgaatcgttattaagtccgggctgccagctcgaaagcctttgggtgaaaagctgttctttcactgctgcttcatgccagcattttagttcgatgttgacgcgcaacaagtgtcttgttgagctccaattgagcaataataaattaggtgattgtggcgtgcagcagctttgccaagggttatctcaaccaggtgcggccctccaggttttgtggttgggcgactgtgatgtaggtcatagtggctgtgcaagcttagcttccgtgttgcttgtcaaccgttccttacgcgaactcgaccttagtaacaactgcatgggcgaagaagggattctccgtttgatggagagcgttgaacaaccgggatgcgtgcttgaacagttggtcctctatgacatctactggtcggaggagatggatcgtcgtttacgtgccttagaagagcgcaaaccgtcattgcgcgtgattttc

SEQ ID NO: 456 - protein, 468 aa, synthetic construct
  REGION 1..468: note = Variant of RNase inhibitor
MHHHHHHGGSGTMSLDIQCQQLSDARWTELLPLLQQSEVVRLDDCGLTESRCKDISSALQANPSLIELSLCTNELGDAGVHLVLQGLQSPTCKIEKLSLQNCCLTKTGCGVLGDMLRSMPTLRALYLNDNPLGDAGLQLLCSGLVDPQCHLEKLQVEYCNLTAASCESLASALRAKRHFKELAVSNNELGEAGVRVLCRGLVESPCQLEVLKLENCGLTSASCEDLCRVVASKPSLQELDLGMNKLGDQGIATLCPTLLHPSCQIRVLWLWNCDITTAGCRDLCRVLRAKPSLKELSLAGNALGDEGARLLCESLLSPGCQLESLWVKSCSFTAASCQHFSSMLTRNKCLVELQLSNNKLGDCGVQQLCQGLSQPGAALQVLWLGDCDVGHSGCASLASVLLVNRSLRELDLSNNCMGEEGILRLMESVEQPGCVLEQLVLYDIYWSEEMDRRLRALEERKPSLRVIF

SEQ ID NO: 457 - DNA, 1404 bp, synthetic construct
  misc_feature 1..1404: note = Variant of RNase inhibitor
  source 1..1404: mol_type = other DNA
atgcaccatcatcatcatcatggcggtagcggcacgatgtctctggacattcagtgtcaacaattgtcagatgcgcgttggcacgaactgttaccgcttctgcaacagagcgaagtggtgcgcctggatgactgcggcctcactgagatgcgctgcaaagacatcagtagtgcactgcaagccaacccatcgttgatcgaattaagcctgtgtacaaatgagctgggtgatgctggagttcacttagtcatccagggcttgcagtctggcaagtgcaagattgaaaaactgtccctccagaactgttgtctgacgaagactggttgcggtgtattaggcgacatgcttcgttcaatgcccaccctgcgcgaactgtatctgaatgataacccgttgggcgatgcgggcctccagctgctttgccaagggctggtggacccgcaatgtcacctggagaaactgcaggtggaatactgcaatctcacagcagcctcgtgcgaaagcttggcgagcgctctgcgtgccaaacgccattttaaagaattagcggtttcgaacaacgaactgggtgaagcaggcgtgcgcgtactttgtcgtgggctggtggatagtccatgccaactggaggttctgaaactggaaaattgtggattgacctctgcctcctgcgaggatctttgtcgtgtggtcgctagcaaaccaagcctccaggaattggaccttggcatgaacaaattaggtgaccaaggcatcgcaacgctatgcccgaccctgcttcacccttcatgccagattcgtgttttgtggctctggaactgtgatatcaccaccgccggctgccgcgacctctgtcgtgtattacgcgcgaagccgtccctcaaagagctgagtcttgcgggtaatgccttgggagatgaaggcgcacgtctcttgtgcgaatcgttattagaaccgggctgccagctcgaaagcctttgggtgaaaagctgttctttcactgctgcttcatgccagcattttagttcgatgttgacgcgcaacaagtgtcttgttgagctccaattgagcaataataaattaggtgattgtggcgtgcagcagctttgccaagggttatctcaaccaggtgcggccctccaggttttgtggttgggcgactgtgatgtaggtcatagtggctgtgcaagcttagcttccgtgttgcttgtcaaccgttccttacgcgaactcgaccttagtaacaactgcatgggcgaagaagggattctccgtttgatggagagcgttgaacaaccgggatgcgtgcttgaacagttggtcctctatgacatctactggtcggaggagatggatcgtcgtttacgtgccttagaagagcgcaaaccgtcattgcgcgtgattttc

SEQ ID NO: 458 - protein, 468 aa, synthetic construct
  REGION 1..468: note = Variant of RNase inhibitor
MHHHHHHGGSGTMSLDIQCQQLSDARWHELLPLLQQSEVVRLDDCGLTEMRCKDISSALQANPSLIELSLCTNELGDAGVHLVIQGLQSGKCKIEKLSLQNCCLTKTGCGVLGDMLRSMPTLRELYLNDNPLGDAGLQLLCQGLVDPQCHLEKLQVEYCNLTAASCESLASALRAKRHFKELAVSNNELGEAGVRVLCRGLVDSPCQLEVLKLENCGLTSASCEDLCRVVASKPSLQELDLGMNKLGDQGIATLCPTLLHPSCQIRVLWLWNCDITTAGCRDLCRVLRAKPSLKELSLAGNALGDEGARLLCESLLEPGCQLESLWVKSCSFTAASCQHFSSMLTRNKCLVELQLSNNKLGDCGVQQLCQGLSQPGAALQVLWLGDCDVGHSGCASLASVLLVNRSLRELDLSNNCMGEEGILRLMESVEQPGCVLEQLVLYDIYWSEEMDRRLRALEERKPSLRVIF

SEQ ID NO: 459 - DNA, 1404 bp, synthetic construct
  misc_feature 1..1404: note = Variant of RNase inhibitor
  source 1..1404: mol_type = other DNA
atgcaccatcatcatcatcatggcggtagcggcacgatgtctctggatattcagtgtcaacaattgtcagatgcgcgttggactgaactgttaccgcttctgcaacaggcggaagtggtgcgcctggatgactgcggcctcactgagatgcgctgcaaagacatcagtagtgcactgcaagccaacccatcgttgaccgaattaagcctgtgtacaaatgagctgggtgatgctggagttcatttagtcctgcagggcttgcagtctcctaagtgcaagattgaaaaactgtccctccagaactgttgtctgacgaagactggttgcggtgtattaggcgacatgcttcgttcaatgcccaccctgcgcgaactgtatctgaatgataacccgttgggcgatgcgggcctccagctgctttgctcggggctggtggacccaaattgtcacctggagaaactgcaggtggaatactgcaatctcacagcagcctcgtgcgaaagcttggcgagcgctctgcgtgccaaacgccattttaaagaattagcggtttcgaacaacgaactgggtgaagcaggcgtgcgcgtactttgtcgtgggctggtggatagtccatgccaactggaggttctgaaactggaaaattgtggattgacctctgcctcctgcgaggatctttgtcgtgtggtcgctagcaaaccaagcctccaggaattggaccttggcatgaacaaattaggtgaccaaggcatcgcaacgttatgcccgaccctgcttcacccttcatgccagattcgtgttttgtggctctggaactgtgatatcaccaccgccggctgccgcgacctctgtcgtgtattacgcgcgaagccgtccctcaaagagctgagtcttgcgggtaatgccttgggagatgaaggcgcacgtctcttgtgcgaatcgttattagaaccgggctgccagctcgaaagcctttgggtgaaaagctgttctttcactgctgcttcatgccagcattttagttcgatgttgacgcgcaacaagtgtcttgttgagctccaattgagcaataataaattaggtgattgtggcgtgcagcagctttgccaagggttatctcaaccaggtgcggccctccaggttttgtggttgggcgactgtgatgtaggtcatagtggctgtgcaagcttagcttccgtgttgcttgtcaaccgttccttacgcgaactcgaccttagtaacaactgcatgggcgaagaagggattctccgtttgatggagagcgttgaacaaccgggatgcgtgcttgaacagttggtcctctatgacatctactggtcggaggagatggatcgtcgtttacgtgccttagaagagcgcaaaccgtcattgcgcgtgattttc

SEQ ID NO: 460 - protein, 468 aa, synthetic construct
  REGION 1..468: note = Variant of RNase inhibitor
MHHHHHHGGSGTMSLDIQCQQLSDARWTELLPLLQQAEVVRLDDCGLTEMRCKDISSALQANPSLTELSLCTNELGDAGVHLVLQGLQSPKCKIEKLSLQNCCLTKTGCGVLGDMLRSMPTLRELYLNDNPLGDAGLQLLCSGLVDPNCHLEKLQVEYCNLTAASCESLASALRAKRHFKELAVSNNELGEAGVRVLCRGLVDSPCQLEVLKLENCGLTSASCEDLCRVVASKPSLQELDLGMNKLGDQGIATLCPTLLHPSCQIRVLWLWNCDITTAGCRDLCRVLRAKPSLKELSLAGNALGDEGARLLCESLLEPGCQLESLWVKSCSFTAASCQHFSSMLTRNKCLVELQLSNNKLGDCGVQQLCQGLSQPGAALQVLWLGDCDVGHSGCASLASVLLVNRSLRELDLSNNCMGEEGILRLMESVEQPGCVLEQLVLYDIYWSEEMDRRLRALEERKPSLRVIF

SEQ ID NO: 461 - DNA, 1404 bp, synthetic construct
  misc_feature 1..1404: note = Variant of RNase inhibitor
  source 1..1404: mol_type = other DNA
atgcaccatcatcatcatcatggcggtagcggcacgatgtctctggatattcagtgtcaacaattgtcagatgcgcgttggcacgaactgttaccgcttctgcaacagtcggaagtggtgcgcctggatgactgcggcctcactgagatgcgctgcaaagacatcagtagtgcactgcaagccaacccatcgttgatcgaattaagcctgtgtacaaatgagctgggtgatgctggagttaccttagtcctgcagggcttgcagtctcctacctgcaagattgaaaaactgtccctccagaactgttgtctgacgaagactggttgcggtgtattaggcgacatgcttcgttcaatgcccaccctgcgcgcactgtatctgaatgataacccgttgggcgatgcgggcctccagctgctttgctccgggctggtggacgaacaatgtcacctggagaaactgcaggtggaatactgcaatctcacagcagcctcgtgcgaaagcttggcgagcgctctgcgtgccaaacgccattttaaagaattagcggtttcgaacaacgaactgggtgaagcaggcgtgcgcgtactttgtcgtgggctggtggatagtgcgtgccaactggaggttctgaaactggaaaattgtggattgacctctgcctcctgcgaggatctttgtcgtgtggtcgctagcaaaccaagcctccaggaattggaccttggcatgaacaaattaggtgaccaaggcatcgcaacgttatgcccgaccctgcttcacccttcatgccagattcgtgttttgtggctctggaactgtgatatcaccaccgccggctgccgcgacctctgtcaggtattacgcgcgaagccgtccctcaaagagctgagtcttgcgggtaatgccttgggagatgaaggcgcacgtctcttgtgcgaatcgttattagaaccgggctgccagctcgaaagcctttgggtgaaaagctgttctttcactgctgcttcatgccagcattttagttcgatgttgacgcgcaacaagtgtcttgttgagctccaattgagcaataataaattaggtgattgtggcgtgcagcagctttgccaagggttatctcaaccaggtgcggccctccaggttttgtggttgggcgactgtgatgtaggtcatagtggctgtgcaagcttagcttccgtgttgcttgtcaaccgttccttacgcgaactcgaccttagtaacaactgcatgggcgaagaagggattctccgtttgatggagagcgttgaacaaccgggatgcgtgcttgaacagttggtcctctatgacatctactggtcggaggagatggatcgtcgtttacgtgccttagaagagcgcaaaccgtcattgcgcgtgattttc

SEQ ID NO: 462 - protein, 468 aa, synthetic construct
  REGION 1..468: note = Variant of RNase inhibitor
MHHHHHHGGSGTMSLDIQCQQLSDARWHELLPLLQQSEVVRLDDCGLTEMRCKDISSALQANPSLIELSLCTNELGDAGVTLVLQGLQSPTCKIEKLSLQNCCLTKTGCGVLGDMLRSMPTLRALYLNDNPLGDAGLQLLCSGLVDEQCHLEKLQVEYCNLTAASCESLASALRAKRHFKELAVSNNELGEAGVRVLCRGLVDSACQLEVLKLENCGLTSASCEDLCRVVASKPSLQELDLGMNKLGDQGIATLCPTLLHPSCQIRVLWLWNCDITTAGCRDLCQVLRAKPSLKELSLAGNALGDEGARLLCESLLEPGCQLESLWVKSCSFTAASCQHFSSMLTRNKCLVELQLSNNKLGDCGVQQLCQGLSQPGAALQVLWLGDCDVGHSGCASLASVLLVNRSLRELDLSNNCMGEEGILRLMESVEQPGCVLEQLVLYDIYWSEEMDRRLRALEERKPSLRVIF

SEQ ID NO: 463 - DNA, 1404 bp, synthetic construct
  misc_feature 1..1404: note = Variant of RNase inhibitor
  source 1..1404: mol_type = other DNA
atgcaccatcatcatcatcatggcggtagcggcacgatgtctctggatattcagtgtcaacaattgtcagatgcgcgttggcacgaactgttaccgcttctgcaacagagcgaagtggtgcgcctggatgactgcggcctcactgagagtcgctgcaaagacatcagtagtgcactgcaagccaacccatcgttgatcgaattaagcctgtgtacaaatgagctgggtgatgctggagttcacttagtcatccagggcttgcagtctggcacgtgcaagattgaaaaactgtccctccagaactgttgtctgacgaagactggttgcggtgtattaggcgacatgcttcgttcaatgcccaccctgcgcgaactgtatctgaatgataacccgttgggcgatgcgggcctccagctgctttgctccgggctggtggacgaacaatgtcacctggagaaactgcaggtggaatactgcaatctcacagcagcctcgtgcgaaagcttggcgagcgctctgcgtgccaaacgccattttaaagaattagcggtttcgaacaacgaactgggtgaagcaggcgtgcgcgtactttgtcgtgggctggtggagagtccatgccaactggaggttctgaaactggaaaattgtggattgacctctgcctcctgcgaggatctttgtcgtgtggtcgctagcaaaccaagcctccaggaattggaccttggcatgaacaaattaggtgaccaaggcatcgcaacgttatgcccgaccctgcttcacccttcatgccagattcgtgttttgtggctctggaactgtgatatcaccaccgccggctgccgcgacctctgtcgtgtattacgcgcgaagccgtccctcaaagagctgagtcttgcgggtaatgccttgggagatgaaggcgcacgtctcttgtgcgaatcgttattaagtccggcctgccagctcgaaagcctttgggtgaaaagctgttctttcactgctgcttcatgccagcattttagttcgatgttgacgcgcaacaagtgtcttgttgagctccaattgagcaataataaattaggtgattgtggcgtgcagcagctttgccaagggttatctcaaccaggtgcggccctccaggttttgtggttgggcgactgtgatgtaggtcatagtggctgtgcaagcttagcttccgtgttgcttgtcaaccgttccttacgcgaactcgaccttagtaacaactgcatgggcgaagaagggattctccgtttgatggagagcgttgaacaaccgggatgcgtgcttgaacagttggtcctctatgacatctactggtcggaggagatggatcgtcgtttacgtgccttagaagagcgcaaaccgtcattgcgcgtgattttc

SEQ ID NO: 464 - protein, 468 aa, synthetic construct
  REGION 1..468: note = Variant of RNase inhibitor
MHHHHHHGGSGTMSLDIQCQQLSDARWHELLPLLQQSEVVRLDDCGLTESRCKDISSALQANPSLIELSLCTNELGDAGVHLVIQGLQSGTCKIEKLSLQNCCLTKTGCGVLGDMLRSMPTLRELYLNDNPLGDAGLQLLCSGLVDEQCHLEKLQVEYCNLTAASCESLASALRAKRHFKELAVSNNELGEAGVRVLCRGLVESPCQLEVLKLENCGLTSASCEDLCRVVASKPSLQELDLGMNKLGDQGIATLCPTLLHPSCQIRVLWLWNCDITTAGCRDLCRVLRAKPSLKELSLAGNALGDEGARLLCESLLSPACQLESLWVKSCSFTAASCQHFSSMLTRNKCLVELQLSNNKLGDCGVQQLCQGLSQPGAALQVLWLGDCDVGHSGCASLASVLLVNRSLRELDLSNNCMGEEGILRLMESVEQPGCVLEQLVLYDIYWSEEMDRRLRALEERKPSLRVIF

SEQ ID NO: 465 - DNA, 1404 bp, synthetic construct
  misc_feature 1..1404: note = Variant of RNase inhibitor
  source 1..1404: mol_type = other DNA
atgcaccatcatcatcatcatggcggtagcggcacgatgtctctggatattcagtgtcaacaattgtcagatgcgcgttggcacgaactgttaccgcttctgcaacagagcgaagtggtgcgcctggatgactgcggcctcactgagagtcgctgcaaagacatcagtagtgcactgcaagccaacccatcgttgaccgaattaagcctgtgtacaaatgagctgggtgatgctggagttcatttagtcctgcagggcttgcagtctggcaagtgcaagattgaaaaactgtccctccagaactgttgtctgacgaagactggttgcggtgtattaggcgacatgcttcgttcaatgcccaccctgcgcgcactgtatctgaatgataacccgttgggcgatgcgggcctccagctgctttgccaagggctggtggacccacaatgtcacctggagaaactgcaggtggaatactgcaatctcacagcagcctcgtgcgaaagcttggcgagcgctctgcgtgccaaacgccattttaaagaattagcggtttcgaacaacgaactgggtgaagcaggcgtgcgcgtactttgtcgtgggctggtggatagtgcgtgccaactggaggttctgaaactggaaaattgtggattgacctctgcctcctgcgaggatctttgtcgtgtggtcgctagcaaaccaagcctccaggaattggaccttggcatgaacaaattaggtgaccaaggcatcgcaacgttatgcccgaccctgcttcacccttcatgccagattcgtgttttgtggctctggaactgtgatatcaccaccgccggctgccgcgacctctgtcgtgtattacgcgcgaagccgtccctcaaagagctgagtcttgcgggtaatgccttgggagatgaaggcgcacgtctcttgtgcgaatcgttattagaaccgggctgccagctcgaaagcctttgggtgaaaagctgttctttcactgctgcttcatgccagcattttagttcgatgttgacgcgcaacaagtgtcttgttgagctccaattgagcaataataaattaggtgattgtggcgtgcagcagctttgccaagggttatctcaaccaggtgcggccctccaggttttgtggttgggcgactgtgatgtaggtcatagtggctgtgcaagcttagcttccgtgttgcttgtcaaccgttccttacgcgaactcgaccttagtaacaactgcatgggcgaagaagggattctccgtttgatggagagcgttgaacaaccgggatgcgtgcttgaacagttggtcctctatgacatctactggtcggaggagatggatcgtcgtttacgtgccttagaagagcgcaaaccgtcattgcgcgtgattttc

SEQ ID NO: 466 - protein, 468 aa, synthetic construct
  REGION 1..468: note = Variant of RNase inhibitor
MHHHHHHGGSGTMSLDIQCQQLSDARWHELLPLLQQSEVVRLDDCGLTESRCKDISSALQANPSLTELSLCTNELGDAGVHLVLQGLQSGKCKIEKLSLQNCCLTKTGCGVLGDMLRSMPTLRALYLNDNPLGDAGLQLLCQGLVDPQCHLEKLQVEYCNLTAASCESLASALRAKRHFKELAVSNNELGEAGVRVLCRGLVDSACQLEVLKLENCGLTSASCEDLCRVVASKPSLQELDLGMNKLGDQGIATLCPTLLHPSCQIRVLWLWNCDITTAGCRDLCRVLRAKPSLKELSLAGNALGDEGARLLCESLLEPGCQLESLWVKSCSFTAASCQHFSSMLTRNKCLVELQLSNNKLGDCGVQQLCQGLSQPGAALQVLWLGDCDVGHSGCASLASVLLVNRSLRELDLSNNCMGEEGILRLMESVEQPGCVLEQLVLYDIYWSEEMDRRLRALEERKPSLRVIF

SEQ ID NO: 467 - DNA, 1404 bp, synthetic construct
  misc_feature 1..1404: note = Variant of RNase inhibitor
  source 1..1404: mol_type = other DNA
atgcaccatcatcatcatcatggcggtagcggcacgatgtctctggatattcagtgtcaacaattgtcagatgcgcgttggacggaactgttaccgcttctgcaacaggcggaagtggtgcgcctggatgactgcggcctcactgagatgcgctgcaaagacatcagtagtgcactgcaagccaacccatcgttgaccgaattaagcctgtgtacaaatgagctgggtgatgctggagttaccttagtcctgcagggcttgcagtctcctacctgcaagattgaaaaactgtccctccagaactgttgtctgacgaagactggttgcggtgtattaggcgacatgcttcgttcaatgcccaccctgcgcgaactgtatctgaatgataacccgttgggcgatgcgggcctccagctgctttgctccgggctggtggacgaaaattgtcacctggagaaactgcaggtggaatactgcaatctcacagcagcctcgtgcgaaagcttggcgagcgctctgcgtgccaaacgccattttaaagaattagcggtttcgaacaacgaactgggtgaagcaggcgtgcgcgtactttgtcgtgggctggtggagagtccatgccaactggaggttctgaaactggaaaattgtggattgacctctgcctcctgcgaggatctttgtcgtgtggtcgctagcaaaccaagcctccaggaattggaccttggcatgaacaaattaggtgaccaaggcatcgcaacgttatgcccgaccctgcttcacccttcatgccagattcgtgttttgtggctctggaactgtgatatcaccaccgccggctgccgcgacctctgtcgcgtattacgcgcgaagccgtccctcaaagagctgagtcttgcgggtaatgccttgggagatgaaggcgcacgtctcttgtgcgaatcgttattagaaccggcctgccagctcgaaagcctttgggtgaaaagctgttctttcactgctgcttcatgccagcattttagttcgatgttgacgcgcaacaagtgtcttgttgagctccaattgagcaataataaattaggtgattgtggcgtgcagcagctttgccaagggttatctcaaccaggtgcggccctccaggttttgtggttgggcgactgtgatgtaggtcatagtggctgtgcaagcttagcttccgtgttgcttgtcaaccgttccttacgcgaactcgaccttagtaacaactgcatgggcgaagaagggattctccgtttgatggagagcgttgaacaaccgggatgcgtgcttgaacagttggtcctctatgacatctactggtcggaggagatggatcgtcgtttacgtgccttagaagagcgcaaaccgtcattgcgcgtgattttc

SEQ ID NO: 468 - protein, 468 aa, synthetic construct
  REGION 1..468: note = Variant of RNase inhibitor
MHHHHHHGGSGTMSLDIQCQQLSDARWTELLPLLQQAEVVRLDDCGLTEMRCKDISSALQANPSLTELSLCTNELGDAGVTLVLQGLQSPTCKIEKLSLQNCCLTKTGCGVLGDMLRSMPTLRELYLNDNPLGDAGLQLLCSGLVDENCHLEKLQVEYCNLTAASCESLASALRAKRHFKELAVSNNELGEAGVRVLCRGLVESPCQLEVLKLENCGLTSASCEDLCRVVASKPSLQELDLGMNKLGDQGIATLCPTLLHPSCQIRVLWLWNCDITTAGCRDLCRVLRAKPSLKELSLAGNALGDEGARLLCESLLEPACQLESLWVKSCSFTAASCQHFSSMLTRNKCLVELQLSNNKLGDCGVQQLCQGLSQPGAALQVLWLGDCDVGHSGCASLASVLLVNRSLRELDLSNNCMGEEGILRLMESVEQPGCVLEQLVLYDIYWSEEMDRRLRALEERKPSLRVIF

SEQ ID NO: 469 - DNA, 1404 bp, synthetic construct
  misc_feature 1..1404: note = Variant of RNase inhibitor
  source 1..1404: mol_type = other DNA
atgcaccatcatcatcatcatggcggtagcggcacgatgtctctggatattcagtgtcaacaattgtcagatgcgcgttggcacgaactgttaccgcttctgcaacagagcgaagtggtgcgcctggatgactgcggcctcactgagatgcgctgcaaagacatcagtagtgcactgcaagccaacccatcgttgatcgaattaagcctgtgtacaaatgagctgggtgatgctggagttaccttagtcctgcagggcttgcagtctggcaagtgcaagattgaaaaactgtccctccagaactgttgtctgacgaagactggttgcggtgtattaggcgacatgcttcgttcaatgcccaccctgcgcgcactgtatctgaatgataacccgttgggcgatgcgggcctccagctgctttgctccgggctggtggacccgcaatgtcacctggagaaactgcaggtggaatactgcaatctcacagcagcctcgtgcgaaagcttggcgagcgctctgcgtgccaaacgccattttaaagaattagcggtttcgaacaacgaactgggtgaagcaggcgtgcgcgtactttgtcgtgggctggtggagagtgcatgccaactggaggttctgaaactggaaaattgtggattgacctctgcctcctgcgaggatctttgtcgtgtggtcgctagcaaaccaagcctccaggaattggaccttggcatgaacaaattaggtgaccaaggcatcgcaacgttatgcccgaccctgcttcacccttcatgccagattcgtgttttgtggctctggaactgtgatatcaccaccgccggctgccgcgacctctgtcaggtattacgcgcgaagccgtccctcaaagagctgagtcttgcgggtaatgccttgggagatgaaggcgcacgtctcttgtgcgaatcgttattaagtccgggctgccagctcgaaagcctttgggtgaaaagctgttctttcactgctgcttcatgccagcattttagttcgatgttgacgcgcaacaagtgtcttgttgagctccaattgagcaataataaattaggtgattgtggcgtgcagcagctttgccaagggttatctcaaccaggtgcggccctccaggttttgtggttgggcgactgtgatgtaggtcatagtggctgtgcaagcttagcttccgtgttgcttgtcaaccgttccttacgcgaactcgaccttagtaacaactgcatgggcgaagaagggattctccgtttgatggagagcgttgaacaaccgggatgcgtgcttgaacagttggtcctctatgacatctactggtcggaggagatggatcgtcgtttacgtgccttagaagagcgcaaaccgtcattgcgcgtgattttc

SEQ ID NO: 470 - protein, 468 aa, synthetic construct
  REGION 1..468: note = Variant of RNase inhibitor
MHHHHHHGGSGTMSLDIQCQQLSDARWHELLPLLQQSEVVRLDDCGLTEMRCKDISSALQANPSLIELSLCTNELGDAGVTLVLQGLQSGKCKIEKLSLQNCCLTKTGCGVLGDMLRSMPTLRALYLNDNPLGDAGLQLLCSGLVDPQCHLEKLQVEYCNLTAASCESLASALRAKRHFKELAVSNNELGEAGVRVLCRGLVESACQLEVLKLENCGLTSASCEDLCRVVASKPSLQELDLGMNKLGDQGIATLCPTLLHPSCQIRVLWLWNCDITTAGCRDLCQVLRAKPSLKELSLAGNALGDEGARLLCESLLSPGCQLESLWVKSCSFTAASCQHFSSMLTRNKCLVELQLSNNKLGDCGVQQLCQGLSQPGAALQVLWLGDCDVGHSGCASLASVLLVNRSLRELDLSNNCMGEEGILRLMESVEQPGCVLEQLVLYDIYWSEEMDRRLRALEERKPSLRVIF

SEQ ID NO: 471 - DNA, 1404 bp, synthetic construct
  misc_feature 1..1404: note = Variant of RNase inhibitor
  source 1..1404: mol_type = other DNA
atgcaccatcatcatcatcatggcggtagcggcacgatgtctctggatattcagtgtcaacaattgtcagatgcgcgttggcacgaactgttaccgcttctgcaacagagcgaagtggtgcgcctggatgactgcggcctcactgagagtcgctgcaaagacatcagtagtgcactgcaagccaacccatcgttgatcgaattaagcctgtgtacaaatgagctgggtgatgctggagttaccttagtcctgcagggcttgcagtctggcaagtgcaagattgaaaaactgtccctccagaactgttgtctgacgaagactggttgcggtgtattaggcgacatgcttcgttcaatgcccaccctgcgcgaactgtatctgaatgataacccgttgggcgatgcgggcctcctgctgctttgctcggggctggtggacgaaaattgtcacctggagaaactgcaggtggaatactgcaatctcacagcagcctcgtgcgaaagcttggcgagcgctctgcgtgccaaacgccattttaaagaattagcggtttcgaacaacgaactgggtgaagcaggcgtgcgcgtactttgtcgtgggctggtggatagtccatgccaactggaggttctgaaactggaaaattgtggattgacctctgcctcctgcgaggatctttgtcgtgtggtcgctagcaaaccaagcctccaggaattggaccttggcatgaacaaattaggtgaccaaggcatcgcaacgttatgcccgaccctgcttcacccttcatgccagattcgtgttttgtggctctggaactgtgatatcaccaccgccggctgccgcgacctctgtcaggtattacgcgcgaagccgtccctcaaagagctgagtcttgcgggtaatgccttgggagatgaaggcgcacgtctcttgtgcgaatcgttattagaaccgggctgccagctcgaaagcctttgggtgaaaagctgttctttcactgctgcttcatgccagcattttagttcgatgttgacgcgcaacaagtgtcttgttgagctccaattgagcaataataaattaggtgattgtggcgtgcagcagctttgccaagggttatctcaaccaggtgcggccctccaggttttgtggttgggcgactgtgatgtaggtcatagtggctgtgcaagcttagcttccgtgttgcttgtcaaccgttccttacgcgaactcgaccttagtaacaactgcatgggcgaagaagggattctccgtttgatggagagcgttgaacaaccgggatgcgtgcttgaacagttggtcctctatgacatctactggtcggaggagatggatcgtcgtttacgtgccttagaagagcgcaaaccgtcattgcgcgtgattttc

SEQ ID NO: 472 - protein, 468 aa, synthetic construct
  REGION 1..468: note = Variant of RNase inhibitor
MHHHHHHGGSGTMSLDIQCQQLSDARWHELLPLLQQSEVVRLDDCGLTESRCKDISSALQANPSLIELSLCTNELGDAGVTLVLQGLQSGKCKIEKLSLQNCCLTKTGCGVLGDMLRSMPTLRELYLNDNPLGDAGLLLLCSGLVDENCHLEKLQVEYCNLTAASCESLASALRAKRHFKELAVSNNELGEAGVRVLCRGLVDSPCQLEVLKLENCGLTSASCEDLCRVVASKPSLQELDLGMNKLGDQGIATLCPTLLHPSCQIRVLWLWNCDITTAGCRDLCQVLRAKPSLKELSLAGNALGDEGARLLCESLLEPGCQLESLWVKSCSFTAASCQHFSSMLTRNKCLVELQLSNNKLGDCGVQQLCQGLSQPGAALQVLWLGDCDVGHSGCASLASVLLVNRSLRELDLSNNCMGEEGILRLMESVEQPGCVLEQLVLYDIYWSEEMDRRLRALEERKPSLRVIF

SEQ ID NO: 473 - DNA, 1404 bp, synthetic construct
  misc_feature 1..1404: note = Variant of RNase inhibitor
  source 1..1404: mol_type = other DNA
atgcaccatcatcatcatcatggcggtagcggcacgatgtctctggatattcagtgtcaacaattgtcagatgcgcgttggcacgaactgttaccgcttctgcaacaggcggaagtggtgcgcctggatgactgcggcctcactgagagtcgctgcaaagacatcagtagtgcactgcaagccaacccatcgttgaccgaattaagcctgtgtacaaatgagctgggtgatgctggagttcatttagtcctgcagggcttgcagtctcctacctgcaagattgaaaaactgtccctccagaactgttgtctgacgaagactggttgcggtgtattaggcgacatgcttcgttcaatgcccaccctgcgcgcactgtatctgaatgataacccgttgggcgatgcgggcctccagctgctttgctcggggctggtggacccgcaatgtcacctggagaaactgcaggtggaatactgcaatctcacagcagcctcgtgcgaaagcttggcgagcgctctgcgtgccaaacgccattttaaagaattagcggtttcgaacaacgaactgggtgaagcaggcgtgcgcgtactttgtcgtgggctggtggatagtgcgtgccaactggaggttctgaaactggaaaattgtggattgacctctgcctcctgcgaggatctttgtcgtgtggtcgctagcaaaccaagcctccaggaattggaccttggcatgaacaaattaggtgaccaaggcatcgcaacgttatgcccgaccctgcttcacccttcatgccagattcgtgttttgtggctctggaactgtgatatcaccaccgccggctgccgcgacctctgtcgtgtattacgcgcgaagccgtccctcaaagagctgagtcttgcgggtaatgccttgggagatgaaggcgcacgtctcttgtgcgaatcgttattagaaccgggctgccagctcgaaagcctttgggtgaaaagctgttctttcactgctgcttcatgccagcattttagttcgatgttgacgcgcaacaagtgtcttgttgagctccaattgagcaataataaattaggtgattgtggcgtgcagcagctttgccaagggttatctcaaccaggtgcggccctccaggttttgtggttgggcgactgtgatgtaggtcatagtggctgtgcaagcttagcttccgtgttgcttgtcaaccgttccttacgcgaactcgaccttagtaacaactgcatgggcgaagaagggattctccgtttgatggagagcgttgaacaaccgggatgcgtgcttgaacagttggtcctctatgacatctactggtcggaggagatggatcgtcgtttacgtgccttagaagagcgcaaaccgtcattgcgcgtgattttc

SEQ ID NO: 474 - protein, 468 aa, synthetic construct
  REGION 1..468: note = Variant of RNase inhibitor
MHHHHHHGGSGTMSLDIQCQQLSDARWHELLPLLQQAEVVRLDDCGLTESRCKDISSALQANPSLTELSLCTNELGDAGVHLVLQGLQSPTCKIEKLSLQNCCLTKTGCGVLGDMLRSMPTLRALYLNDNPLGDAGLQLLCSGLVDPQCHLEKLQVEYCNLTAASCESLASALRAKRHFKELAVSNNELGEAGVRVLCRGLVDSACQLEVLKLENCGLTSASCEDLCRVVASKPSLQELDLGMNKLGDQGIATLCPTLLHPSCQIRVLWLWNCDITTAGCRDLCRVLRAKPSLKELSLAGNALGDEGARLLCESLLEPGCQLESLWVKSCSFTAASCQHFSSMLTRNKCLVELQLSNNKLGDCGVQQLCQGLSQPGAALQVLWLGDCDVGHSGCASLASVLLVNRSLRELDLSNNCMGEEGILRLMESVEQPGCVLEQLVLYDIYWSEEMDRRLRALEERKPSLRVIF

SEQ ID NO: 475 - DNA, 1404 bp, synthetic construct
  misc_feature 1..1404: note = Variant of RNase inhibitor
  source 1..1404: mol_type = other DNA
atgcaccatcatcatcatcatggcggtagcggcacgatgtctctggatattcagtgtcaacaattgtcagatgcgcgttggacggaactgttaccgcttctgcaacagtcggaagtggtgcgcctggatgactgcggcctcactgagatgcgctgcaaagacatcagtagtgcactgcaagccaacccatcgttgaccgaattaagcctgtgtacaaatgagctgggtgatgctggagttaccttagtcctgcagggcttgcagtctggcaagtgcaagattgaaaaactgtccctccagaactgttgtctgacgaagactggttgcggtgtattaggcgacatgcttcgttcaatgcccaccctgcgcgcactgtatctgaatgataacccgttgggcgatgcgggcctccagctgctttgctcggggctggtggacccgcaatgtcacctggagaaactgcaggtggaatactgcaatctcacagcagcctcgtgcgaaagcttggcgagcgctctgcgtgccaaacgccattttaaagaattagcggtttcgaacaacgaactgggtgaagcaggcgtgcgcgtactttgtcgtgggctggtggatagtgcatgccaactggaggttctgaaactggaaaattgtggattgacctctgcctcctgcgaggatctttgtcgtgtggtcgctagcaaaccaagcctccaggaattggaccttggcatgaacaaattaggtgaccaaggcatcgcaacgttatgcccgaccctgcttcacccttcatgccagattcgtgttttgtggctctggaactgtgatatcaccaccgccggctgccgcgacctctgtcaggtattacgcgcgaagccgtccctcaaagagctgagtcttgcgggtaatgccttgggagatgaaggcgcacgtctcttgtgcgaatcgttattaagtccggcctgccagctcgaaagcctttgggtgaaaagctgttctttcactgctgcttcatgccagcattttagttcgatgttgacgcgcaacaagtgtcttgttgagctccaattgagcaataataaattaggtgattgtggcgtgcagcagctttgccaagggttatctcaaccaggtgcggccctccaggttttgtggttgggcgactgtgatgtaggtcatagtggctgtgcaagcttagcttccgtgttgcttgtcaaccgttccttacgcgaactcgaccttagtaacaactgcatgggcgaagaagggattctccgtttgatggagagcgttgaacaaccgggatgcgtgcttgaacagttggtcctctatgacatctactggtcggaggagatggatcgtcgtttacgtgccttagaagagcgcaaaccgtcattgcgcgtgattttc

SEQ ID NO: 476 - protein, 468 aa, synthetic construct
  REGION 1..468: note = Variant of RNase inhibitor
MHHHHHHGGSGTMSLDIQCQQLSDARWTELLPLLQQSEVVRLDDCGLTEMRCKDISSALQANPSLTELSLCTNELGDAGVTLVLQGLQSGKCKIEKLSLQNCCLTKTGCGVLGDMLRSMPTLRALYLNDNPLGDAGLQLLCSGLVDPQCHLEKLQVEYCNLTAASCESLASALRAKRHFKELAVSNNELGEAGVRVLCRGLVDSACQLEVLKLENCGLTSASCEDLCRVVASKPSLQELDLGMNKLGDQGIATLCPTLLHPSCQIRVLWLWNCDITTAGCRDLCQVLRAKPSLKELSLAGNALGDEGARLLCESLLSPACQLESLWVKSCSFTAASCQHFSSMLTRNKCLVELQLSNNKLGDCGVQQLCQGLSQPGAALQVLWLGDCDVGHSGCASLASVLLVNRSLRELDLSNNCMGEEGILRLMESVEQPGCVLEQLVLYDIYWSEEMDRRLRALEERKPSLRVIF

SEQ ID NO: 477 - DNA, 1404 bp, synthetic construct
  misc_feature 1..1404: note = Variant of RNase inhibitor
  source 1..1404: mol_type = other DNA
atgcaccatcatcatcatcatggcggtagcggcacgatgtctctggatattcagtgtcaacaattgtcagatgcgcgttggactgaactgttaccgcttctgcaacagagcgaagtggtgcgcctggatgactgcggcctcactgagagtcgctgcaaagacatcagtagtgcactgcaagccaacccatcgttgaccgaattaagcctgtgtacaaatgagctgggtgatgctggagttcatttagtcctgcagggcttgcagtctggcacgtgcaagattgaaaaactgtccctccagaactgttgtctgacgaagactggttgcggtgtattaggcgacatgcttcgttcaatgcccaccctgcgcgaactgtatctgaatgataacccgttgggcgatgcgggcctccagctgctttgccaagggctggtggacccgcaatgtcacctggagaaactgcaggtggaatactgcaatctcacagcagcctcgtgcgaaagcttggcgagcgctctgcgtgccaaacgccattttaaagaattagcggtttcgaacaacgaactgggtgaagcaggcgtgcgcgtactttgtcgtgggctggtggagagtgcatgccaactggaggttctgaaactggaaaattgtggattgacctctgcctcctgcgaggatctttgtcgtgtggtcgctagcaaaccaagcctccaggaattggaccttggcatgaacaaattaggtgaccaaggcatcgcaacgttatgcccgaccctgcttcacccttcatgccagattcgtgttttgtggctctggaactgtgatatcaccaccgccggctgccgcgacctctgtcaggtattacgcgcgaagccgtccctcaaagagctgagtcttgcgggtaatgccttgggagatgaaggcgcacgtctcttgtgcgaatcgttattagaaccggcgtgccagctcgaaagcctttgggtgaaaagctgttctttcactgctgcttcatgccagcattttagttcgatgttgacgcgcaacaagtgtcttgttgagctccaattgagcaataataaattaggtgattgtggcgtgcagcagctttgccaagggttatctcaaccaggtgcggccctccaggttttgtggttgggcgactgtgatgtaggtcatagtggctgtgcaagcttagcttccgtgttgcttgtcaaccgttccttacgcgaactcgaccttagtaacaactgcatgggcgaagaagggattctccgtttgatggagagcgttgaacaaccgggatgcgtgcttgaacagttggtcctctatgacatctactggtcggaggagatggatcgtcgtttacgtgccttagaagagcgcaaaccgtcattgcgcgtgattttc

SEQ ID NO: 478 - protein, 468 aa, synthetic construct
  REGION 1..468: note = Variant of RNase inhibitor
MHHHHHHGGSGTMSLDIQCQQLSDARWTELLPLLQQSEVVRLDDCGLTESRCKDISSALQANPSLTELSLCTNELGDAGVHLVLQGLQSGTCKIEKLSLQNCCLTKTGCGVLGDMLRSMPTLRELYLNDNPLGDAGLQLLCQGLVDPQCHLEKLQVEYCNLTAASCESLASALRAKRHFKELAVSNNELGEAGVRVLCRGLVESACQLEVLKLENCGLTSASCEDLCRVVASKPSLQELDLGMNKLGDQGIATLCPTLLHPSCQIRVLWLWNCDITTAGCRDLCQVLRAKPSLKELSLAGNALGDEGARLLCESLLEPACQLESLWVKSCSFTAASCQHFSSMLTRNKCLVELQLSNNKLGDCGVQQLCQGLSQPGAALQVLWLGDCDVGHSGCASLASVLLVNRSLRELDLSNNCMGEEGILRLMESVEQPGCVLEQLVLYDIYWSEEMDRRLRALEERKPSLRVIF

SEQ ID NO: 479 - DNA, 1404 bp, synthetic construct
  misc_feature 1..1404: note = Variant of RNase inhibitor
  source 1..1404: mol_type = other DNA
atgcaccatcatcatcatcatggcggtagcggcacgatgtctctggatattcagtgtcaacaattgtcagatgcgcgttggactgaactgttaccgcttctgcaacagagcgaagtggtgcgcctggatgactgcggcctcactgagagtcgctgcaaagacatcagtagtgcactgcaagccaacccatcgttgaccgaattaagcctgtgtacaaatgagctgggtgatgctggagttcatttagtcctgcagggcttgcagtctggcacgtgcaagattgaaaaactgtccctccagaactgttgtctgacgaagactggttgcggtgtattaggcgacatgcttcgttcaatgcccaccctgcgcgcactgtatctgaatgataacccgttgggcgatgcgggcctccagctgctttgccaagggctggtggacccgcaatgtcacctggagaaactgcaggtggaatactgcaatctcacagcagcctcgtgcgaaagcttggcgagcgctctgcgtgccaaacgccattttaaagaattagcggtttcgaacaacgaactgggtgaagcaggcgtgcgcgtactttgtcgtgggctggtggatagtccatgccaactggaggttctgaaactggaaaattgtggattgacctctgcctcctgcgaggatctttgtcgtgtggtcgctagcaaaccaagcctccaggaattggaccttggcatgaacaaattaggtgaccaaggcatcgcaacgttatgcccgaccctgcttcacccttcatgccagattcgtgttttgtggctctggaactgtgatatcaccaccgccggctgccgcgacctctgtcaggtattacgcgcgaagccgtccctcaaagagctgagtcttgcgggtaatgccttgggagatgaaggcgcacgtctcttgtgcgaatcgttattagaaccgggctgccagctcgaaagcctttgggtgaaaagctgttctttcactgctgcttcatgccagcattttagttcgatgttgacgcgcaacaagtgtcttgttgagctccaattgagcaataataaattaggtgattgtggcgtgcagcagctttgccaagggttatctcaaccaggtgcggccctccaggttttgtggttgggcgactgtgatgtaggtcatagtggctgtgcaagcttagcttccgtgttgcttgtcaaccgttccttacgcgaactcgaccttagtaacaactgcatgggcgaagaagggattctccgtttgatggagagcgttgaacaaccgggatgcgtgcttgaacagttggtcctctatgacatctactggtcggaggagatggatcgtcgtttacgtgccttagaagagcgcaaaccgtcattgcgcgtgattttc

SEQ ID NO: 480 - protein, 468 aa, synthetic construct
  REGION 1..468: note = Variant of RNase inhibitor
MHHHHHHGGSGTMSLDIQCQQLSDARWTELLPLLQQSEVVRLDDCGLTESRCKDISSALQANPSLTELSLCTNELGDAGVHLVLQGLQSGTCKIEKLSLQNCCLTKTGCGVLGDMLRSMPTLRALYLNDNPLGDAGLQLLCQGLVDPQCHLEKLQVEYCNLTAASCESLASALRAKRHFKELAVSNNELGEAGVRVLCRGLVDSPCQLEVLKLENCGLTSASCEDLCRVVASKPSLQELDLGMNKLGDQGIATLCPTLLHPSCQIRVLWLWNCDITTAGCRDLCQVLRAKPSLKELSLAGNALGDEGARLLCESLLEPGCQLESLWVKSCSFTAASCQHFSSMLTRNKCLVELQLSNNKLGDCGVQQLCQGLSQPGAALQVLWLGDCDVGHSGCASLASVLLVNRSLRELDLSNNCMGEEGILRLMESVEQPGCVLEQLVLYDIYWSEEMDRRLRALEERKPSLRVIF

SEQ ID NO: 481 - DNA, 1404 bp, synthetic construct
  misc_feature 1..1404: note = Variant of RNase inhibitor
  source 1..1404: mol_type = other DNA
atgcaccatcatcatcatcatggcggtagcggcacgatgtctctggatattcagtgtcaacaattgtcagatgcgcgttggcacgaactgttaccgcttctgcaacagtcggaagtggtgcgcctggatgactgcggcctcactgagatgcgctgcaaagacatcagtagtgcactgcaagccaacccatcgttgatcgaattaagcctgtgtacaaatgagctgggtgatgctggagttcatttagtcctgcagggcttgcagtctggcaagtgcaagattgaaaaactgtccctccagaactgttgtctgacgaagactggttgcggtgtattaggcgacatgcttcgttcaatgcccaccctgcgcgaactgtatctgaatgataacccgttgggcgatgcgggcctccagctgctttgctccgggctggtggacgaaaattgtcacctggagaaactgcaggtggaatactgcaatctcacagcagcctcgtgcgaaagcttggcgagcgctctgcgtgccaaacgccattttaaagaattagcggtttcgaacaacgaactgggtgaagcaggcgtgcgcgtactttgtcgtgggctggtggatagtccatgccaactggaggttctgaaactggaaaattgtggattgacctctgcctcctgcgaggatctttgtcgtgtggtcgctagcaaaccaagcctccaggaattggaccttggcatgaacaaattaggtgaccaaggcatcgcaacgttatgcccgaccctgcttcacccttcatgccagattcgtgttttgtggctctggaactgtgatatcaccaccgccggctgccgcgacctctgtcgtgtattacgcgcgaagccgtccctcaaagagctgagtcttgcgggtaatgccttgggagatgaaggcgcacgtctcttgtgcgaatcgttattagaaccgggctgccagctcgaaagccttttggtgaaaagctgttctttcactgctgcttcatgccagcattttagttcgatgttgacgcgcaacaagtgtcttgttgagctccaattgagcaataataaattaggtgattgtggcgtgcagcagctttgccaagggttatctcaaccaggtgcggccctccaggttttgtggttgggcgactgtgatgtaggtcatagtggctgtgcaagcttagcttccgtgttgcttgtcaaccgttccttacgcgaactcgaccttagtaacaactgcatgggcgaagaagggattctccgtttgatggagagcgttgaacaaccgggatgcgtgcttgaacagttggtcctctatgacatctactggtcggaggagatggatcgtcgtttacgtgccttagaagagcgcaaaccgtcattgcgcgtgattttc

SEQ ID NO: 482 - protein, 468 aa, synthetic construct
  REGION 1..468: note = Variant of RNase inhibitor
MHHHHHHGGSGTMSLDIQCQQLSDARWHELLPLLQQSEVVRLDDCGLTEMRCKDISSALQANPSLIELSLCTNELGDAGVHLVLQGLQSGKCKIEKLSLQNCCLTKTGCGVLGDMLRSMPTLRELYLNDNPLGDAGLQLLCSGLVDENCHLEKLQVEYCNLTAASCESLASALRAKRHFKELAVSNNELGEAGVRVLCRGLVDSPCQLEVLKLENCGLTSASCEDLCRVVASKPSLQELDLGMNKLGDQGIATLCPTLLHPSCQIRVLWLWNCDITTAGCRDLCRVLRAKPSLKELSLAGNALGDEGARLLCESLLEPGCQLESLLVKSCSFTAASCQHFSSMLTRNKCLVELQLSNNKLGDCGVQQLCQGLSQPGAALQVLWLGDCDVGHSGCASLASVLLVNRSLRELDLSNNCMGEEGILRLMESVEQPGCVLEQLVLYDIYWSEEMDRRLRALEERKPSLRVIF

SEQ ID NO: 483 - DNA, 1404 bp, synthetic construct
  misc_feature 1..1404: note = Variant of RNase inhibitor
  source 1..1404: mol_type = other DNA
atgcaccatcatcatcatcatggcggtagcggcacgatgtctctggatattcagtgtcaacaattgtcagatgcgcgttggactgaactgttaccgcttctgcaacagagcgaagtggtgcgcctggatgactgcggcctcactgagatgcgctgcaaagacatcagtagtgcactgcaagccaacccatcgttgatcgaattaagcctgtgtacaaatgagctgggtgatgctggagttaccttagtcctgcagggcttgcagtctcctacctgcaagattgaaaaactgtccctccagaactgttgtctgacgaagactggttgcggtgtattaggcgacatgcttcgttcaatgcccaccctgcgcgaactgtatctgaatgataacccgttgggcgatgcgggcctccagctgctttgctcggggctggtggacccgcaatgtcacctggagaaactgcaggtggaatactgcaatctcacagcagcctcgtgcgaaagcttggcgagcgctctgcgtgccaaacgccattttaaagaattagcggtttcgaacaacgaactgggtgaagcaggcgtgcgcgtactttgtcgtgggctggtggatagtgcatgccaactggaggttctgaaactggaaaattgtggattgacctctgcctcctgcgaggatctttgtcgtgtggtcgctagcaaaccaagcctccaggaattggaccttggcatgaacaaattaggtgaccaaggcatcgcaacgttatgcccgaccctgcttcacccttcatgccagattcgtgttttgtggctctggaactgtgatatcaccaccgccggctgccgcgacctctgtcgcgtattacgcgcgaagccgtccctcaaagagctgagtcttgcgggtaatgccttgggagatgaaggcgcacgtctcttgtgcgaatcgttattagaaccgggctgccagctcgaaagcctttgggtgaaaagctgttctttcactgctgcttcatgccagcattttagttcgatgttgacgcgcaacaagtgtcttgttgagctccaattgagcaataataaattaggtgattgtggcgtgcagcagctttgccaagggttatctcaaccaggtgcggccctccaggttttgtggttgggcgactgtgatgtaggtcatagtggctgtgcaagcttagcttccgtgttgcttgtcaaccgttccttacgcgaactcgaccttagtaacaactgcatgggcgaagaagggattctccgtttgatggagagcgttgaacaaccgggatgcgtgcttgaacagttggtcctctatgacatctactggtcggaggagatggatcgtcgtttacgtgccttagaagagcgcaaaccgtcattgcgcgtgattttc

SEQ ID NO: 484 - protein, 468 aa, synthetic construct
  REGION 1..468: note = Variant of RNase inhibitor
MHHHHHHGGSGTMSLDIQCQQLSDARWTELLPLLQQSEVVRLDDCGLTEMRCKDISSALQANPSLIELSLCTNELGDAGVTLVLQGLQSPTCKIEKLSLQNCCLTKTGCGVLGDMLRSMPTLRELYLNDNPLGDAGLQLLCSGLVDPQCHLEKLQVEYCNLTAASCESLASALRAKRHFKELAVSNNELGEAGVRVLCRGLVDSACQLEVLKLENCGLTSASCEDLCRVVASKPSLQELDLGMNKLGDQGIATLCPTLLHPSCQIRVLWLWNCDITTAGCRDLCRVLRAKPSLKELSLAGNALGDEGARLLCESLLEPGCQLESLWVKSCSFTAASCQHFSSMLTRNKCLVELQLSNNKLGDCGVQQLCQGLSQPGAALQVLWLGDCDVGHSGCASLASVLLVNRSLRELDLSNNCMGEEGILRLMESVEQPGCVLEQLVLYDIYWSEEMDRRLRALEERKPSLRVIF

SEQ ID NO: 485 - DNA, 1404 bp, synthetic construct
  misc_feature 1..1404: note = Variant of RNase inhibitor
  source 1..1404: mol_type = other DNA
atgcaccatcatcatcatcatggcggtagcggcacgatgtctctggatattcagtgtcaacaattgtcagatgcgcgttggcacgaactgttaccgcttctgcaacagagcgaagtggtgcgcctggatgactgcggcctcactgagatgcgctgcaaagacatcagtagtgcactgcaagccaacccatcgttgatcgaattaagcctgtgtacaaatgagctgggtgatgctggagttcatttagtcctgcagggcttgcagtctggcacgtgcaagattgaaaaactgtccctccagaactgttgtctgacgaagactggttgcggtgtattaggcgacatgcttcgttcaatgcccaccctgcgcgaactgtatctgaatgataacccgttgggcgatgcgggcctccagctgctttgctcggggctggtggacccgcaatgtcacctggagaaactgcaggtggaatactgcaatctcacagcagcctcgtgcgaaagcttggcgagcgctctgcgtgccaaacgccattttaaagaattagcggtttcgaacaacgaactgggtgaagcaggcgtgcgcgtactttgtcgtgggctggtggagagtccatgccaactggaggttctgaaactggaaaattgtggattgacctctgcctcctgcgaggatctttgtcgtgtggtcgctagcaaaccaagcctccaggaattggaccttggcatgaacaaattaggtgaccaaggcatcgcaacgttatgcccgaccctgcttcacccttcatgccagattcgtgttttgtggctctggaactgtgatatcaccaccgccggctgccgcgacctctgtcgcgtattacgcgcgaagccgtccctcaaagagctgagtcttgcgggtaatgccttgggagatgaaggcgcacgtctcttgtgcgaatcgttattagaaccgggctgccagctcgaaagcctttgggtgaaaagctgttctttcactgctgcttcatgccagcattttagttcgatgttgacgcgcaacaagtgtcttgttgagctccaattgagcaataataaattaggtgattgtggcgtgcagcagctttgccaagggttatctcaaccaggtgcggccctccaggttttgtggttgggcgactgtgatgtaggtcatagtggctgtgcaagcttagcttccgtgttgcttgtcaaccgttccttacgcgaactcgaccttagtaacaactgcatgggcgaagaagggattctccgtttgatggagagcgttgaacaaccgggatgcgtgcttgaacagttggtcctctatgacatctactggtcggaggagatggatcgtcgtttacgtgccttagaagagcgcaaaccgtcattgcgcgtgattttc

SEQ ID NO: 486 - protein, 468 aa, synthetic construct
  REGION 1..468: note = Variant of RNase inhibitor
MHHHHHHGGSGTMSLDIQCQQLSDARWHELLPLLQQSEVVRLDDCGLTEMRCKDISSALQANPSLIELSLCTNELGDAGVHLVLQGLQSGTCKIEKLSLQNCCLTKTGCGVLGDMLRSMPTLRELYLNDNPLGDAGLQLLCSGLVDPQCHLEKLQVEYCNLTAASCESLASALRAKRHFKELAVSNNELGEAGVRVLCRGLVESPCQLEVLKLENCGLTSASCEDLCRVVASKPSLQELDLGMNKLGDQGIATLCPTLLHPSCQIRVLWLWNCDITTAGCRDLCRVLRAKPSLKELSLAGNALGDEGARLLCESLLEPGCQLESLWVKSCSFTAASCQHFSSMLTRNKCLVELQLSNNKLGDCGVQQLCQGLSQPGAALQVLWLGDCDVGHSGCASLASVLLVNRSLRELDLSNNCMGEEGILRLMESVEQPGCVLEQLVLYDIYWSEEMDRRLRALEERKPSLRVIF

SEQ ID NO: 487 - DNA, 1404 bp, synthetic construct
  misc_feature 1..1404: note = Variant of RNase inhibitor
  source 1..1404: mol_type = other DNA
atgcaccatcatcatcatcatggcggtagcggcacgatgtctctggatattcagtgtcaacaattgtcagatgcgcgttggactgaactgttaccgcttctgcaacagagcgaagtggtgcgcctggatgactgcggcctcactgagagtcgctgcaaagacatcagtagtgcactgcaagccaacccatcgttgatcgaattaagcctgtgtacaaatgagctgggtgatgctggagttcatttagtcctgcagggcttgcagtctggcaagtgcaagattgaaaaactgtccctccagaactgttgtctgacgaagactggttgcggtgtattaggcgacatgcttcgttcaatgcccaccctgcgcgaactgtatctgaatgataacccgttgggcgatgcgggcctccagctgctttgctccgggctggtggacccacaatgtcacctggagaaactgcaggtggaatactgcaatctcacagcagcctcgtgcgaaagcttggcgagcgctctgcgtgccaaacgccattttaaagaattagcggtttcgaacaacgaactgggtgaagcaggcgtgcgcgtactttgtcgtgggctggtggatagtccatgccaactggaggttctgaaactggaaaattgtggattgacctctgcctcctgcgaggatctttgtcgtgtggtcgctagcaaaccaagcctccaggaattggaccttggcatgaacaaattaggtgaccaaggcatcgcaacgttatgcccgaccctgcttcacccttcatgccagattcgtgttttgtggctctggaactgtgatatcaccaccgccggctgccgcgacctctgtcgtgtattacgcgcgaagccgtccctcaaagagctgagtcttgcgggtaatgccttgggagatgaaggcgcacgtctcttgtgcgaatcgttattagaaccggcgtgccagctcgaaagcctttgggtgaaaagctgttctttcactgctgcttcatgccagcattttagttcgatgttgacgcgcaacaagtgtcttgttgagctccaattgagcaataataaattaggtgattgtggcgtgcagcagctttgccaagggttatctcaaccaggtgcggccctccaggttttgtggttgggcgactgtgatgtaggtcatagtggctgtgcaagcttagcttccgtgttgcttgtcaaccgttccttacgcgaactcgaccttagtaacaactgcatgggcgaagaagggattctccgtttgatggagagcgttgaacaaccgggatgcgtgcttgaacagttggtcctctatgacatctactggtcggaggagatggatcgtcgtttacgtgccttagaagagcgcaaaccgtcattgcgcgtgattttc

SEQ ID NO: 488 - protein, 468 aa, synthetic construct
  REGION 1..468: note = Variant of RNase inhibitor
MHHHHHHGGSGTMSLDIQCQQLSDARWTELLPLLQQSEVVRLDDCGLTESRCKDISSALQANPSLIELSLCTNELGDAGVHLVLQGLQSGKCKIEKLSLQNCCLTKTGCGVLGDMLRSMPTLRELYLNDNPLGDAGLQLLCSGLVDPQCHLEKLQVEYCNLTAASCESLASALRAKRHFKELAVSNNELGEAGVRVLCRGLVDSPCQLEVLKLENCGLTSASCEDLCRVVASKPSLQELDLGMNKLGDQGIATLCPTLLHPSCQIRVLWLWNCDITTAGCRDLCRVLRAKPSLKELSLAGNALGDEGARLLCESLLEPACQLESLWVKSCSFTAASCQHFSSMLTRNKCLVELQLSNNKLGDCGVQQLCQGLSQPGAALQVLWLGDCDVGHSGCASLASVLLVNRSLRELDLSNNCMGEEGILRLMESVEQPGCVLEQLVLYDIYWSEEMDRRLRALEERKPSLRVIF

SEQ ID NO: 489 - DNA, 1404 bp, synthetic construct
  misc_feature 1..1404: note = Variant of RNase inhibitor
  source 1..1404: mol_type = other DNA
atgcaccatcatcatcatcatggcggtagcggcacgatgtctctggatattcagtgtcaacaattgtcagatgcgcgttggactgaactgttaccgcttctgcaacagagcgaagtggtgcgcctggatgactgcggcctcactgagagtcgctgcaaagacatcagtagtgcactgcaagccaacccatcgttgatcgaattaagcctgtgtacaaatgagctgggtgatgctggagttcacttagtcctgcagggcttgcagtctcctacctgcaagattgaaaaactgtccctccagaactgttgtctgacgaagactggttgcggtgtattaggcgacatgcttcgttcaatgcccaccctgcgcgaactgtatctgaatgataacccgttgggcgatgcgggcctccagctgctttgctccgggctggtggacgaacaatgtcacctggagaaactgcaggtggaatactgcaatctcacagcagcctcgtgcgaaagcttggcgagcgctctgcgtgccaaacgccattttaaagaattagcggtttcgaacaacgaactgggtgaagcaggcgtgcgcgtactttgtcgtgggctggtggatagtccatgccaactggaggttctgaaactggaaaattgtggattgacctctgcctcctgcgaggatctttgtcgtgtggtcgctagcaaaccaagcctccaggaattggaccttggcatgaacaaattaggtgaccaaggcatcgcaacgttatgcccgaccctgcttcacccttcatgccagattcgtgttttgtggctctggaactgtgatatcaccaccgccggctgccgcgacctctgtcgtgtattacgcgcgaagccgtccctcaaagagctgagtcttgcgggtaatgccttgggagatgaaggcgcacgtctcttgtgcgaatcgttattagaaccggcgtgccagctcgaaagcctttgggtgaaaagctgttctttcactgctgcttcatgccagcattttagttcgatgttgacgcgcaacaagtgtcttgttgagctccaattgagcaataataaattaggtgattgtggcgtgcagcagctttgccaagggttatctcaaccaggtgcggccctccaggttttgtggttgggcgactgtgatgtaggtcatagtggctgtgcaagcttagcttccgtgttgcttgtcaaccgttccttacgcgaactcgaccttagtaacaactgcatgggcgaagaagggattctccgtttgatggagagcgttgaacaaccgggatgcgtgcttgaacagttggtcctctatgacatctactggtcggaggagatggatcgtcgtttacgtgccttagaagagcgcaaaccgtcattgcgcgtgattttc

SEQ ID NO: 490 - protein, 468 aa, synthetic construct
  REGION 1..468: note = Variant of RNase inhibitor
MHHHHHHGGSGTMSLDIQCQQLSDARWTELLPLLQQSEVVRLDDCGLTESRCKDISSALQANPSLIELSLCTNELGDAGVHLVLQGLQSPTCKIEKLSLQNCCLTKTGCGVLGDMLRSMPTLRELYLNDNPLGDAGLQLLCSGLVDEQCHLEKLQVEYCNLTAASCESLASALRAKRHFKELAVSNNELGEAGVRVLCRGLVDSPCQLEVLKLENCGLTSASCEDLCRVVASKPSLQELDLGMNKLGDQGIATLCPTLLHPSCQIRVLWLWNCDITTAGCRDLCRVLRAKPSLKELSLAGNALGDEGARLLCESLLEPACQLESLWVKSCSFTAASCQHFSSMLTRNKCLVELQLSNNKLGDCGVQQLCQGLSQPGAALQVLWLGDCDVGHSGCASLASVLLVNRSLRELDLSNNCMGEEGILRLMESVEQPGCVLEQLVLYDIYWSEEMDRRLRALEERKPSLRVIF

SEQ ID NO: 491 - DNA, 1404 bp, synthetic construct
  misc_feature 1..1404: note = Variant of RNase inhibitor
  source 1..1404: mol_type = other DNA
atgcaccatcatcatcatcatggcggtagcggcacgatgtctctggatattcagtgtcaacaattgtcagatgcgcgttggacggaactgttaccgcttctgcaacaggcggaagtggtgcgcctggatgactgcggcctcactgagatgcgctgcaaagacatcagtagtgcactgcaagccaacccatcgttgaccgaattaagcctgtgtacaaatgagctgggtgatgctggagttaccttagtcctgcagggcttgcagtctcctacctgcaagattgaaaaactgtccctccagaactgttgtctgacgaagactggttgcggtgtattaggcgacatgcttcgttcaatgcccaccctgcgcgaactgtatctgaatgataacccgttgggcgatgcgggcctccagctgctttgctcggggctggtggacccgcaatgtcacctggagaaactgcaggtggaatactgcaatctcacagcagcctcgtgcgaaagcttggcgagcgctctgcgtgccaaacgccattttaaagaattagcggtttcgaacaacgaactgggtgaagcaggcgtgcgcgtactttgtcgtgggctggtggatagtgcgtgccaactggaggttctgaaactggaaaattgtggattgacctctgcctcctgcgaggatctttgtcgtgtggtcgctagcaaaccaagcctccaggaattggaccttggcatgaacaaattaggtgaccaaggcatcgcaacgttatgcccgaccctgcttcacccttcatgccagattcgtgttttgtggctctggaactgtgatatcaccaccgccggctgccgcgacctctgtcaggtattacgcgcgaagccgtccctcaaagagctgagtcttgcgggtaatgccttgggagatgaaggcgcacgtctcttgtgcgaatcgttattagaaccggcgtgccagctcgaaagcctttgggtgaaaagctgttctttcactgctgcttcatgccagcattttagttcgatgttgacgcgcaacaagtgtcttgttgagctccaattgagcaataataaattaggtgattgtggcgtgcagcagctttgccaagggttatctcaaccaggtgcggccctccaggttttgtggttgggcgactgtgatgtaggtcatagtggctgtgcaagcttagcttccgtgttgcttgtcaaccgttccttacgcgaactcgaccttagtaacaactgcatgggcgaagaagggattctccgtttgatggagagcgttgaacaaccgggatgcgtgcttgaacagttggtcctctatgacatctactggtcggaggagatggatcgtcgtttacgtgccttagaagagcgcaaaccgtcattgcgcgtgattttc

SEQ ID NO: 492 - protein, 468 aa, synthetic construct
  REGION 1..468: note = Variant of RNase inhibitor
MHHHHHHGGSGTMSLDIQCQQLSDARWTELLPLLQQAEVVRLDDCGLTEMRCKDISSALQANPSLTELSLCTNELGDAGVTLVLQGLQSPTCKIEKLSLQNCCLTKTGCGVLGDMLRSMPTLRELYLNDNPLGDAGLQLLCSGLVDPQCHLEKLQVEYCNLTAASCESLASALRAKRHFKELAVSNNELGEAGVRVLCRGLVDSACQLEVLKLENCGLTSASCEDLCRVVASKPSLQELDLGMNKLGDQGIATLCPTLLHPSCQIRVLWLWNCDITTAGCRDLCQVLRAKPSLKELSLAGNALGDEGARLLCESLLEPACQLESLWVKSCSFTAASCQHFSSMLTRNKCLVELQLSNNKLGDCGVQQLCQGLSQPGAALQVLWLGDCDVGHSGCASLASVLLVNRSLRELDLSNNCMGEEGILRLMESVEQPGCVLEQLVLYDIYWSEEMDRRLRALEERKPSLRVIF

SEQ ID NO: 493 - DNA, 1404 bp, synthetic construct
  misc_feature 1..1404: note = Variant of RNase inhibitor
  source 1..1404: mol_type = other DNA
atgcaccatcatcatcatcatggcggtagcggcacgatgtctctggatattcagtgtcaacaattgtcagatgcgcgttggacggaactgttaccgcttctgcaacagagcgaagtggtgcgcctggatgactgcggcctcactgagagtcgctgcaaagacatcagtagtgcactgcaagccaacccatcgttgatcgaattaagcctgtgtacaaatgagctgggtgatgctggagttcacttagtcctgcagggcttgcagtctggcaagtgcaagattgaaaaactgtccctccagaactgttgtctgacgaagactggttgcggtgtattaggcgacatgcttcgttcaatgcccaccctgcgcgaactgtatctgaatgataacccgttgggcgatgcgggcctccagctgctttgctccgggctggtggacccgcaatgtcacctggagaaactgcaggtggaatactgcaatctcacagcagcctcgtgcgaaagcttggcgagcgctctgcgtgccaaacgccattttaaagaattagcggtttcgaacaacgaactgggtgaagcaggcgtgcgcgtactttgtcgtgggctggtggatagtgcgtgccaactggaggttctgaaactggaaaattgtggattgacctctgcctcctgcgaggatctttgtcgtgtggtcgctagcaaaccaagcctccaggaattggaccttggcatgaacaaattaggtgaccaaggcatcgcaacgttatgcccgaccctgcttcacccttcatgccagattcgtgttttgtggctctggaactgtgatatcaccaccgccggctgccgcgacctctgtcgtgtattacgcgcgaagccgtccctcaaagagctgagtcttgcgggtaatgccttgggagatgaaggcgcacgtctcttgtgcgaatcgttattagaaccgggctgccagctcgaaagcctttgggtgaaaagctgttctttcactgctgcttcatgccagcattttagttcgatgttgacgcgcaacaagtgtcttgttgagctccaattgagcaataataaattaggtgattgtggcgtgcagcagctttgccaagggttatctcaaccaggtgcggccctccaggttttgtggttgggcgactgtgatgtaggtcatagtggctgtgcaagcttagcttccgtgttgcttgtcaaccgttccttacgcgaactcgaccttagtaacaactgcatgggcgaagaagggattctccgtttgatggagagcgttgaacaaccgggatgcgtgcttgaacagttggtcctctatgacatctactggtcggaggagatggatcgtcgtttacgtgccttagaagagcgcaaaccgtcattgcgcgtgattttc

SEQ ID NO: 494 - protein, 468 aa, synthetic construct
  REGION 1..468: note = Variant of RNase inhibitor
MHHHHHHGGSGTMSLDIQCQQLSDARWTELLPLLQQSEVVRLDDCGLTESRCKDISSALQANPSLIELSLCTNELGDAGVHLVLQGLQSGKCKIEKLSLQNCCLTKTGCGVLGDMLRSMPTLRELYLNDNPLGDAGLQLLCSGLVDPQCHLEKLQVEYCNLTAASCESLASALRAKRHFKELAVSNNELGEAGVRVLCRGLVDSACQLEVLKLENCGLTSASCEDLCRVVASKPSLQELDLGMNKLGDQGIATLCPTLLHPSCQIRVLWLWNCDITTAGCRDLCRVLRAKPSLKELSLAGNALGDEGARLLCESLLEPGCQLESLWVKSCSFTAASCQHFSSMLTRNKCLVELQLSNNKLGDCGVQQLCQGLSQPGAALQVLWLGDCDVGHSGCASLASVLLVNRSLRELDLSNNCMGEEGILRLMESVEQPGCVLEQLVLYDIYWSEEMDRRLRALEERKPSLRVIF

SEQ ID NO: 495 - DNA, 1404 bp, synthetic construct
  misc_feature 1..1404: note = Variant of RNase inhibitor
  source 1..1404: mol_type = other DNA
atgcaccatcatcatcatcatggcggtagcggcacgatgtctctggatattcagtgtcaacaattgtcagatgcgcgttggacggaactgttaccgcttctgcaacagagcgaagtggtgcgcctggatgactgcggcctcactgagagtcgctgcaaagacatcagtagtgcactgcaagccaacccatcgttgaccgaattaagcctgtgtacaaatgagctgggtgatgctggagttcacttagtcctgcagggcttgcagtctcctacctgcaagattgaaaaactgtccctccagaactgttgtctgacgaagactggttgcggtgtattaggcgacatgcttcgttcaatgcccaccctgcgcgaactgtatctgaatgataacccgttgggcgatgcgggcctccagctgctttgctccgggctggtggacgaacaatgtcacctggagaaactgcaggtggaatactgcaatctcacagcagcctcgtgcgaaagcttggcgagcgctctgcgtgccaaacgccattttaaagaattagcggtttcgaacaacgaactgggtgaagcaggcgtgcgcgtactttgtcgtgggctggtggagagtgcatgccaactggaggttctgaaactggaaaattgtggattgacctctgcctcctgcgaggatctttgtcgtgtggtcgctagcaaaccaagcctccaggaattggaccttggcatgaacaaattaggtgaccaaggcatcgcaacgttatgcccgaccctgcttcacccttcatgccagattcgtgttttgtggctctggaactgtgatatcaccaccgccggctgccgcgacctctgtcaggtattacgcgcgaagccgtccctcaaagagctgagtcttgcgggtaatgccttgggagatgaaggcgcacgtctcttgtgcgaatcgttattagaaccggcgtgccagctcgaaagcctttgggtgaaaagctgttctttcactgctgcttcatgccagcattttagttcgatgttgacgcgcaacaagtgtcttgttgagctccaattgagcaataataaattaggtgattgtggcgtgcagcagctttgccaagggttatctcaaccaggtgcggccctccaggttttgtggttgggcgactgtgatgtaggtcatagtggctgtgcaagcttagcttccgtgttgcttgtcaaccgttccttacgcgaactcgaccttagtaacaactgcatgggcgaagaagggattctccgtttgatggagagcgttgaacaaccgggatgcgtgcttgaacagttggtcctctatgacatctactggtcggaggagatggatcgtcgtttacgtgccttagaagagcgcaaaccgtcattgcgcgtgattttc

SEQ ID NO: 496 - protein, 468 aa, synthetic construct
  REGION 1..468: note = Variant of RNase inhibitor
MHHHHHHGGSGTMSLDIQCQQLSDARWTELLPLLQQSEVVRLDDCGLTESRCKDISSALQANPSLTELSLCTNELGDAGVHLVLQGLQSPTCKIEKLSLQNCCLTKTGCGVLGDMLRSMPTLRELYLNDNPLGDAGLQLLCSGLVDEQCHLEKLQVEYCNLTAASCESLASALRAKRHFKELAVSNNELGEAGVRVLCRGLVESACQLEVLKLENCGLTSASCEDLCRVVASKPSLQELDLGMNKLGDQGIATLCPTLLHPSCQIRVLWLWNCDITTAGCRDLCQVLRAKPSLKELSLAGNALGDEGARLLCESLLEPACQLESLWVKSCSFTAASCQHFSSMLTRNKCLVELQLSNNKLGDCGVQQLCQGLSQPGAALQVLWLGDCDVGHSGCASLASVLLVNRSLRELDLSNNCMGEEGILRLMESVEQPGCVLEQLVLYDIYWSEEMDRRLRALEERKPSLRVIF

SEQ ID NO: 497 - DNA, 1404 bp, synthetic construct
  misc_feature 1..1404: note = Variant of RNase inhibitor
  source 1..1404: mol_type = other DNA
atgcaccatcatcatcatcatggcggtagcggcacgatgtctctggatattcagtgtcaacaattgtcagatgcgcgttggacggaactgttaccgcttctgcaacaggcggaagtggtgcgcctggatgactgcggcctcactgagagtcgctgcaaagacatcagtagtgcactgcaagccaacccatcgttgaccgaattaagcctgtgtacaaatgagctgggtgatgctggagttaccttagtcctgcagggcttgcagtctcctacctgcaagattgaaaaactgtccctccagaactgttgtctgacgaagactggttgcggtgtattaggcgacatgcttcgttcaatgcccaccctgcgcgaactgtatctgaatgataacccgttgggcgatgcgggcctccagctgctttgctccgggctggtggacccaaattgtcacctggagaaactgcaggtggaatactgcaatctcacagcagcctcgtgcgaaagcttggcgagcgctctgcgtgccaaacgccattttaaagaattagcggtttcgaacaacgaactgggtgaagcaggcgtgcgcgtactttgtcgtgggctggtggatagtgcgtgccaactggaggttctgaaactggaaaattgtggattgacctctgcctcctgcgaggatctttgtcgtgtggtcgctagcaaaccaagcctccaggaattggaccttggcatgaacaaattaggtgaccaaggcatcgcaacgttatgcccgaccctgcttcacccttcatgccagattcgtgttttgtggctctggaactgtgatatcaccaccgccggctgccgcgacctctgtcgtgtattacgcgcgaagccgtccctcaaagagctgagtcttgcgggtaatgccttgggagatgaaggcgcacgtctcttgtgcgaatcgttattagaaccggcgtgccagctcgaaagcctttgggtgaaaagctgttctttcactgctgcttcatgccagcattttagttcgatgttgacgcgcaacaagtgtcttgttgagctccaattgagcaataataaattaggtgattgtggcgtgcagcagctttgccaagggttatctcaaccaggtgcggccctccaggttttgtggttgggcgactgtgatgtaggtcatagtggctgtgcaagcttagcttccgtgttgcttgtcaaccgttccttacgcgaactcgaccttagtaacaactgcatgggcgaagaagggattctccgtttgatggagagcgttgaacaaccgggatgcgtgcttgaacagttggtcctctatgacatctactggtcggaggagatggatcgtcgtttacgtgccttagaagagcgcaaaccgtcattgcgcgtgattttc

SEQ ID NO: 498 - protein, 468 aa, synthetic construct
  REGION 1..468: note = Variant of RNase inhibitor
MHHHHHHGGSGTMSLDIQCQQLSDARWTELLPLLQQAEVVRLDDCGLTESRCKDISSALQANPSLTELSLCTNELGDAGVTLVLQGLQSPTCKIEKLSLQNCCLTKTGCGVLGDMLRSMPTLRELYLNDNPLGDAGLQLLCSGLVDPNCHLEKLQVEYCNLTAASCESLASALRAKRHFKELAVSNNELGEAGVRVLCRGLVDSACQLEVLKLENCGLTSASCEDLCRVVASKPSLQELDLGMNKLGDQGIATLCPTLLHPSCQIRVLWLWNCDITTAGCRDLCRVLRAKPSLKELSLAGNALGDEGARLLCESLLEPACQLESLWVKSCSFTAASCQHFSSMLTRNKCLVELQLSNNKLGDCGVQQLCQGLSQPGAALQVLWLGDCDVGHSGCASLASVLLVNRSLRELDLSNNCMGEEGILRLMESVEQPGCVLEQLVLYDIYWSEEMDRRLRALEERKPSLRVIF

SEQ ID NO: 499 - DNA, 1404 bp, synthetic construct
  misc_feature 1..1404: note = Variant of RNase inhibitor
  source 1..1404: mol_type = other DNA
atgcaccatcatcatcatcatggcggtagcggcacgatgtctctggatattcagtgtcaacaattgtcagatgcgcgttggcacgaactgttaccgcttctgcaacagagcgaagtggtgcgcctggatgactgcggcctcactgagatgcgctgcaaagacatcagtagtgcactgcaagccaacccatcgttgatcgaattaagcctgtgtacaaatgagctgggtgatgctggagttcatttagtcctgcagggcttgcagtctcctacctgcaagattgaaaaactgtccctccagaactgttgtctgacgaagactggttgcggtgtattaggcgacatgcttcgttcaatgcccaccctgcgcgaactgtatctgaatgataacccgttgggcgatgcgggcctccagctgctttgccaagggctggtggacccgcaatgtcacctggagaaactgcaggtggaatactgcaatctcacagcagcctcgtgcgaaagcttggcgagcgctctgcgtgccaaacgccattttaaagaattagcggtttcgaacaacgaactgggtgaagcaggcgtgcgcgtactttgtcgtgggctggtggatagtgcgtgccaactggaggttctgaaactggaaaattgtggattgacctctgcctcctgcgaggatctttgtcgtgtggtcgctagcaaaccaagcctccaggaattggaccttggcatgaacaaattaggtgaccaaggcatcgcaacgttatgcccgaccctgcttcacccttcatgccagattcgtgttttgtggctctggaactgtgatatcaccaccgccggctgccgcgacctctgtcgtgtattacgcgcgaagccgtccctcaaagagctgagtcttgcgggtaatgccttgggagatgaaggcgcacgtctcttgtgcgaatcgttattagaaccgggctgccagctcgaaagcctttgggtgaaaagctgttctttcactgctgcttcatgccagcattttagttcgatgttgacgcgcaacaagtgtcttgttgagctccaattgagcaataataaattaggtgattgtggcgtgcagcagctttgccaagggttatctcaaccaggtgcggccctccaggttttgtggttgggcgactgtgatgtaggtcatagtggctgtgcaagcttagcttccgtgttgcttgtcaaccgttccttacgcgaactcgaccttagtaacaactgcatgggcgaagaagggattctccgtttgatggagagcgttgaacaaccgggatgcgtgcttgaacagttggtcctctatgacatctactggtcggaggagatggatcgtcgtttacgtgccttagaagagcgcaaaccgtcattgcgcgtgattttc

SEQ ID NO: 500 - protein, 468 aa, synthetic construct
  REGION 1..468: note = Variant of RNase inhibitor
MHHHHHHGGSGTMSLDIQCQQLSDARWHELLPLLQQSEVVRLDDCGLTEMRCKDISSALQANPSLIELSLCTNELGDAGVHLVLQGLQSPTCKIEKLSLQNCCLTKTGCGVLGDMLRSMPTLRELYLNDNPLGDAGLQLLCQGLVDPQCHLEKLQVEYCNLTAASCESLASALRAKRHFKELAVSNNELGEAGVRVLCRGLVDSACQLEVLKLENCGLTSASCEDLCRVVASKPSLQELDLGMNKLGDQGIATLCPTLLHPSCQIRVLWLWNCDITTAGCRDLCRVLRAKPSLKELSLAGNALGDEGARLLCESLLEPGCQLESLWVKSCSFTAASCQHFSSMLTRNKCLVELQLSNNKLGDCGVQQLCQGLSQPGAALQVLWLGDCDVGHSGCASLASVLLVNRSLRELDLSNNCMGEEGILRLMESVEQPGCVLEQLVLYDIYWSEEMDRRLRALEERKPSLRVIF

SEQ ID NO: 501 - DNA, 1404 bp, synthetic construct
  misc_feature 1..1404: note = Variant of RNase inhibitor
  source 1..1404: mol_type = other DNA
atgcaccatcatcatcatcatggcggtagcggcacgatgtctcgcgatattcagtgtcaacaattgtcagatgcgcgttggcacgaactgttaccgcttctgcaacagtcggaagtggtgcgcctggatgactgcggcctcactgagatgcgctgcaaagacatcagtagtgcactgcaagccaacccatcgttgatcgaattaagcctgtgtacaaatgagctgggtgatgctggagttaccttagtcctgcagggcttgcagtctggcaagtgcaagattgaaaaactgtccctccagaactgttgtctgacgaagactggttgcggtgtattaggcgacatgcttcgttcaatgcccaccctgcgcgaactgtatctgaatgataacccgttgggcgatgcgggcctccagctgctttgctccgggctggtggacgaaaattgtcacctggagaaactgcaggtggaatactgcaatctcacagcagcctcgtgcgaaagcttggcgagcgctctgcgtgccaaacgccattttaaagaattagcggtttcgaacaacgaactgggtgaagcaggcgtgcgcgtactttgtcgtgggctggtggatagtgcatgccaactggaggttctgaaactggaaaattgtggattgacctctgcctcctgcgaggatctttgtcgtgtggtcgctagcaaaccaagcctccaggaattggaccttggcatgaacaaattaggtgaccaaggcatcgcaacgttatgcccgaccctgcttcacccttcatgccagattcgtgttttgtggctctggaactgtgatatcaccaccgccggctgccgcgacctctgtcgtgtattacgcgcgaagccgtccctcaaagagctgagtcttgcgggtaatgccttgggagatgaaggcgcacgtctcttgtgcgaatcgttattagaaccgggctgccagctcgaaagcctttgggtgaaaagctgttctttcactgctgcttcatgccagcattttagttcgatgttgacgcgcaacaagtgtcttgttgagctccaattgagcaataataaattaggtgattgtggcgtgcagcagctttgccaagggttatctcaaccaggtgcggccctccaggttttgtggttgggcgactgtgatgtaggtcatagtggctgtgcaagcttagcttccgtgttgcttgtcaaccgttccttacgcgaactcgaccttagtaacaactgcatgggcgaagaagggattctccgtttgatggagagcgttgaacaaccgggatgcgtgcttgaacagttggtcctctatgacatctactggtcggaggagatggatcgtcgtttacgtgccttagaagagcgcaaaccgtcattgcgcgtgattttc

SEQ ID NO: 502 - protein, 468 aa, synthetic construct
  REGION 1..468: note = Variant of RNase inhibitor
MHHHHHHGGSGTMSRDIQCQQLSDARWHELLPLLQQSEVVRLDDCGLTEMRCKDISSALQANPSLIELSLCTNELGDAGVTLVLQGLQSGKCKIEKLSLQNCCLTKTGCGVLGDMLRSMPTLRELYLNDNPLGDAGLQLLCSGLVDENCHLEKLQVEYCNLTAASCESLASALRAKRHFKELAVSNNELGEAGVRVLCRGLVDSACQLEVLKLENCGLTSASCEDLCRVVASKPSLQELDLGMNKLGDQGIATLCPTLLHPSCQIRVLWLWNCDITTAGCRDLCRVLRAKPSLKELSLAGNALGDEGARLLCESLLEPGCQLESLWVKSCSFTAASCQHFSSMLTRNKCLVELQLSNNKLGDCGVQQLCQGLSQPGAALQVLWLGDCDVGHSGCASLASVLLVNRSLRELDLSNNCMGEEGILRLMESVEQPGCVLEQLVLYDIYWSEEMDRRLRALEERKPSLRVIF

SEQ ID NO: 503 - DNA, 1404 bp, synthetic construct
  misc_feature 1..1404: note = Variant of RNase inhibitor
  source 1..1404: mol_type = other DNA
atgcaccatcatcatcatcatggcggtagcggcacgatgtctcgcgatattcagtgtcaacaattgtcagatgcgcgttggcacgaactgttaccgcttctgcaacagagcgaagtggtgcgcctggatgactgcggcctcactgagatgcgctgcaaagacatcagtagtgcactgcaagccaacccatcgttgaccgaattaagcctgtgtacaaatgagctgggtgatgctggagttaccttagtcctgcagggcttgcagtctggcaagtgcaagattgaaaaactgtccctccagaactgttgtctgacgaagactggttgcggtgtattaggcgacatgcttcgttcaatgcccaccctgcgcgaactgtatctgaatgataacccgttgggcgatgcgggcctccagctgctttgccaagggctggtggacccgcaatgtcacctggagaaactgcaggtggaatactgcaatctcacagcagcctcgtgcgaaagcttggcgagcgctctgcgtgccaaacgccattttaaagaattagcggtttcgaacaacgaactgggtgaagcaggcgtgcgcgtactttgtcgtgggctggtggatagtgcgtgccaactggaggttctgaaactggaaaattgtggattgacctctgcctcctgcgaggatctttgtcgtgtggtcgctagcaaaccaagcctccaggaattggaccttggcatgaacaaattaggtgaccaaggcatcgcaacgttatgcccgaccctgcttcacccttcatgccagattcgtgttttgtggctctggaactgtgatatcaccaccgccggctgccgcgacctctgtcaggtattacgcgcgaagccgtccctcaaagagctgagtcttgcgggtaatgccttgggagatgaaggcgcacgtctcttgtgcgaatcgttattaagtccgggctgccagctcgaaagcctttgggtgaaaagctgttctttcactgctgcttcatgccagcattttagttcgatgttgacgcgcaacaagtgtcttgttgagctccaattgagcaataataaattaggtgattgtggcgtgcagcagctttgccaagggttatctcaaccaggtgcggccctccaggttttgtggttgggcgactgtgatgtaggtcatagtggctgtgcaagcttagcttccgtgttgcttgtcaaccgttccttacgcgaactcgaccttagtaacaactgcatgggcgaagaagggattctccgtttgatggagagcgttgaacaaccgggatgcgtgcttgaacagttggtcctctatgacatctactggtcggaggagatggatcgtcgtttacgtgccttagaagagcgcaaaccgtcattgcgcgtgattttc

SEQ ID NO: 504 - protein, 468 aa, synthetic construct
  REGION 1..468: note = Variant of RNase inhibitor
MHHHHHHGGSGTMSRDIQCQQLSDARWHELLPLLQQSEVVRLDDCGLTEMRCKDISSALQANPSLTELSLCTNELGDAGVTLVLQGLQSGKCKIEKLSLQNCCLTKTGCGVLGDMLRSMPTLRELYLNDNPLGDAGLQLLCQGLVDPQCHLEKLQVEYCNLTAASCESLASALRAKRHFKELAVSNNELGEAGVRVLCRGLVDSACQLEVLKLENCGLTSASCEDLCRVVASKPSLQELDLGMNKLGDQGIATLCPTLLHPSCQIRVLWLWNCDITTAGCRDLCQVLRAKPSLKELSLAGNALGDEGARLLCESLLSPGCQLESLWVKSCSFTAASCQHFSSMLTRNKCLVELQLSNNKLGDCGVQQLCQGLSQPGAALQVLWLGDCDVGHSGCASLASVLLVNRSLRELDLSNNCMGEEGILRLMESVEQPGCVLEQLVLYDIYWSEEMDRRLRALEERKPSLRVIF

SEQ ID NO: 505 - DNA, 1404 bp, synthetic construct
  misc_feature 1..1404: note = Variant of RNase inhibitor
  source 1..1404: mol_type = other DNA
atgcaccatcatcatcatcatggcggtagcggcacgatgtctcgcgatattcagtgtcaacaattgtcagatgcgcgttggcacgaactgttaccgcttctgcaacaggcggaagtggtgcgcctggatgactgcggcctcactgagagtcgctgcaaagacatcagtagtgcactgcaagccaacccatcgttgatcgaattaagcctgtgtacaaatgagctgggtgatgctggagttcatttagtcctgcagggcttgcagtctcctacctgcaagattgaaaaactgtccctccagaactgttgtctgacgaagactggttgcggtgtattaggcgacatgcttcgttcaatgcccaccctgcgcgcactgtatctgaatgataacccgttgggcgatgcgggcctccagctgctttgctccgggctggtggacgaaaattgtcacctggagaaactgcaggtggaatactgcaatctcacagcagcctcgtgcgaaagcttggcgagcgctctgcgtgccaaacgccattttaaagaattagcggtttcgaacaacgaactgggtgaagcaggcgtgcgcgtactttgtcgtgggctggtggatagtccatgccaactggaggttctgaaactggaaaattgtggattgacctctgcctcctgcgaggatctttgtcgtgtggtcgctagcaaaccaagcctccaggaattggaccttggcatgaacaaattaggtgaccaaggcatcgcaacgttatgcccgaccctgcttcacccttcatgccagattcgtgttttgtggctctggaactgtgatatcaccaccgccggctgccgcgacctctgtcaggtattacgcgcgaagccgtccctcaaagagctgagtcttgcgggtaatgccttgggagatgaaggcgcacgtctcttgtgcgaatcgttattagaaccggcctgccagctcgaaagcctttgggtgaaaagctgttctttcactgctgcttcatgccagcattttagttcgatgttgacgcgcaacaagtgtcttgttgagctccaattgagcaataataaattaggtgattgtggcgtgcagcagctttgccaagggttatctcaaccaggtgcggccctccaggttttgtggttgggcgactgtgatgtaggtcatagtggctgtgcaagcttagcttccgtgttgcttgtcaaccgttccttacgcgaactcgaccttagtaacaactgcatgggcgaagaagggattctccgtttgatggagagcgttgaacaaccgggatgcgtgcttgaacagttggtcctctatgacatctactggtcggaggagatggatcgtcgtttacgtgccttagaagagcgcaaaccgtcattgcgcgtgattttc

SEQ ID NO: 506 - protein, 468 aa, synthetic construct
  REGION 1..468: note = Variant of RNase inhibitor
MHHHHHHGGSGTMSRDIQCQQLSDARWHELLPLLQQAEVVRLDDCGLTESRCKDISSALQANPSLIELSLCTNELGDAGVHLVLQGLQSPTCKIEKLSLQNCCLTKTGCGVLGDMLRSMPTLRALYLNDNPLGDAGLQLLCSGLVDENCHLEKLQVEYCNLTAASCESLASALRAKRHFKELAVSNNELGEAGVRVLCRGLVDSPCQLEVLKLENCGLTSASCEDLCRVVASKPSLQELDLGMNKLGDQGIATLCPTLLHPSCQIRVLWLWNCDITTAGCRDLCQVLRAKPSLKELSLAGNALGDEGARLLCESLLEPACQLESLWVKSCSFTAASCQHFSSMLTRNKCLVELQLSNNKLGDCGVQQLCQGLSQPGAALQVLWLGDCDVGHSGCASLASVLLVNRSLRELDLSNNCMGEEGILRLMESVEQPGCVLEQLVLYDIYWSEEMDRRLRALEERKPSLRVIF

SEQ ID NO: 507 - DNA, 1404 bp, synthetic construct
  misc_feature 1..1404: note = Variant of RNase inhibitor
  source 1..1404: mol_type = other DNA
atgcaccatcatcatcatcatggcggtagcggcacgatgtctcgcgatattcagtgtcaacaattgtcagatgcgcgttggacggaactgttaccgcttctgcaacagagcgaagtggtgcgcctggatgactgcggcctcactgagatgcgctgcaaagacatcagtagtgcactgcaagccaacccatcgttgatcgaattaagcctgtgtacaaatgagctgggtgatgctggagttaccttagtcctgcagggcttgcagtctcctacctgcaagattgaaaaactgtccctccagaactgttgtctgacgaagactggttgcggtgtattaggcgacatgcttcgttcaatgcccaccctgcgcgaactgtatctgaatgataacccgttgggcgatgcgggcctccagctgctttgctccgggctggtggacgaaaattgtcacctggagaaactgcaggtggaatactgcaatctcacagcagcctcgtgcgaaagcttggcgagcgctctgcgtgccaaacgccattttaaagaattagcggtttcgaacaacgaactgggtgaagcaggcgtgcgcgtactttgtcgtgggctggtggatagtgcgtgccaactggaggttctgaaactggaaaattgtggattgacctctgcctcctgcgaggatctttgtcgtgtggtcgctagcaaaccaagcctccaggaattggaccttggcatgaacaaattaggtgaccaaggcatcgcaacgttatgcccgaccctgcttcacccttcatgccagattcgtgttttgtggctctggaactgtgatatcaccaccgccggctgccgcgacctctgtcgtgtattacgcgcgaagccgtccctcaaagagctgagtcttgcgggtaatgccttgggagatgaaggcgcacgtctcttgtgcgaatcgttattagaaccggcgtgccagctcgaaagcctttgggtgaaaagctgttctttcactgctgcttcatgccagcattttagttcgatgttgacgcgcaacaagtgtcttgttgagctccaattgagcaataataaattaggtgattgtggcgtgcagcagctttgccaagggttatctcaaccaggtgcggccctccaggttttgtggttgggcgactgtgatgtaggtcatagtggctgtgcaagcttagcttccgtgttgcttgtcaaccgttccttacgcgaactcgaccttagtaacaactgcatgggcgaagaagggattctccgtttgatggagagcgttgaacaaccgggatgcgtgcttgaacagttggtcctctatgacatctactggtcggaggagatggatcgtcgtttacgtgccttagaagagcgcaaaccgtcattgcgcgtgattttc

SEQ ID NO: 508 - protein, 468 aa, synthetic construct
  REGION 1..468: note = Variant of RNase inhibitor
MHHHHHHGGSGTMSRDIQCQQLSDARWTELLPLLQQSEVVRLDDCGLTEMRCKDISSALQANPSLIELSLCTNELGDAGVTLVLQGLQSPTCKIEKLSLQNCCLTKTGCGVLGDMLRSMPTLRELYLNDNPLGDAGLQLLCSGLVDENCHLEKLQVEYCNLTAASCESLASALRAKRHFKELAVSNNELGEAGVRVLCRGLVDSACQLEVLKLENCGLTSASCEDLCRVVASKPSLQELDLGMNKLGDQGIATLCPTLLHPSCQIRVLWLWNCDITTAGCRDLCRVLRAKPSLKELSLAGNALGDEGARLLCESLLEPACQLESLWVKSCSFTAASCQHFSSMLTRNKCLVELQLSNNKLGDCGVQQLCQGLSQPGAALQVLWLGDCDVGHSGCASLASVLLVNRSLRELDLSNNCMGEEGILRLMESVEQPGCVLEQLVLYDIYWSEEMDRRLRALEERKPSLRVIF

SEQ ID NO: 509 - DNA, 1404 bp, synthetic construct
  misc_feature 1..1404: note = Variant of RNase inhibitor
  source 1..1404: mol_type = other DNA
atgcaccatcatcatcatcatggcggtagcggcacgatgtctctggatattcagtgtcaacaattgtcagatgcgcgttggactgaactgttaccgcttctgcaacagtcggaagtggtgcgcctggatgactgcggcctcactgagatgcgctgcaaagacatcagtagtgcactgcaagccaacccatcgttgatcgaattaagcctgtgtacaaatgagctgggtgatgctggagttcatttagtcctgcagggcttgcagtctcctaagtgcaagattgaaaaactgtccctccagaactgttgtctgacgaagactggttgcggtgtattaggcgacatgcttcgttcaatgcccaccctgcgcgcactgtatctgaatgataacccgttgggcgatgcgggcctccagctgctttgccaagggctggtggacgaaaattgtcacctggagaaactgcaggtggaatactgcaatctcacagcagcctcgtgcgaaagcttggcgagcgctctgcgtgccaaacgccattttaaagaattagcggtttcgaacaacgaactgggtgaagcaggcgtgcgcgtactttgtcgtgggctggtggatagtgcgtgccaactggaggttctgaaactggaaaattgtggattgacctctgcctcctgcgaggatctttgtcgtgtggtcgctagcaaaccaagcctccaggaattggaccttggcatgaacaaattaggtgaccaaggcatcgcaacgttatgcccgaccctgcttcacccttcatgccagattcgtgttttgtggctctggaactgtgatatcaccaccgccggctgccgcgacctctgtcgtgtattacgcgcgaagccgtccctcaaagagctgagtcttgcgggtaatgccttgggagatgaaggcgcacgtctcttgtgcgaatcgttattagaaccggcgtgccagctcgaaagcctttgggtgaaaagctgttctttcactgctgcttcatgccagcattttagttcgatgttgacgcgcaacaagtgtcttgttgagctccaattgagcaataataaattaggtgattgtggcgtgcagcagctttgccaagggttatctcaaccaggtgcggccctccaggttttgtggttgggcgactgtgatgtaggtcatagtggctgtgcaagcttagcttccgtgttgcttgtcaaccgttccttacgcgaactcgaccttagtaacaactgcatgggcgaagaagggattctccgtttgatggagagcgttgaacaaccgggatgcgtgcttgaacagttggtcctctatgacatctactggtcggaggagatggatcgtcgtttacgtgccttagaagagcgcaaaccgtcattgcgcgtgattttc

SEQ ID NO: 510 - protein, 468 aa, synthetic construct
  REGION 1..468: note = Variant of RNase inhibitor
MHHHHHHGGSGTMSLDIQCQQLSDARWTELLPLLQQSEVVRLDDCGLTEMRCKDISSALQANPSLIELSLCTNELGDAGVHLVLQGLQSPKCKIEKLSLQNCCLTKTGCGVLGDMLRSMPTLRALYLNDNPLGDAGLQLLCQGLVDENCHLEKLQVEYCNLTAASCESLASALRAKRHFKELAVSNNELGEAGVRVLCRGLVDSACQLEVLKLENCGLTSASCEDLCRVVASKPSLQELDLGMNKLGDQGIATLCPTLLHPSCQIRVLWLWNCDITTAGCRDLCRVLRAKPSLKELSLAGNALGDEGARLLCESLLEPACQLESLWVKSCSFTAASCQHFSSMLTRNKCLVELQLSNNKLGDCGVQQLCQGLSQPGAALQVLWLGDCDVGHSGCASLASVLLVNRSLRELDLSNNCMGEEGILRLMESVEQPGCVLEQLVLYDIYWSEEMDRRLRALEERKPSLRVIF

SEQ ID NO: 511 - DNA, 1404 bp, synthetic construct
  misc_feature 1..1404: note = Variant of RNase inhibitor
  source 1..1404: mol_type = other DNA
atgcaccatcatcatcatcatggcggtagcggcacgatgtctcgcgatattcagtgtcaacaattgtcagatgcgcgttggacggaactgttaccgcttctgcaacaggcggaagtggtgcgcctggatgactgcggcctcactgagatgcgctgcaaagacatcagtagtgcactgcaagccaacccatcgttgatcgaattaagcctgtgtacaaatgagctgggtgatgctggagttaccttagtcctgcagggcttgcagtctcctacctgcaagattgaaaaactgtccctccagaactgttgtctgacgaagactggttgcggtgtattaggcgacatgcttcgttcaatgcccaccctgcgcgaactgtatctgaatgataacccgttgggcgatgcgggcctccagctgctttgctccgggctggtggacgaaaattgtcacctggagaaactgcaggtggaatactgcaatctcacagcagcctcgtgcgaaagcttggcgagcgctctgcgtgccaaacgccattttaaagaattagcggtttcgaacaacgaactgggtgaagcaggcgtgcgcgtactttgtcgtgggctggtggatagtgcgtgccaactggaggttctgaaactggaaaattgtggattgacctctgcctcctgcgaggatctttgtcgtgtggtcgctagcaaaccaagcctccaggaattggaccttggcatgaacaaattaggtgaccaaggcatcgcaacgttatgcccgaccctgcttcacccttcatgccagattcgtgttttgtggctctggaactgtgatatcaccaccgccggctgccgcgacctctgtcgtgtattacgcgcgaagccgtccctcaaagagctgagtcttgcgggtaatgccttgggagatgaaggcgcacgtctcttgtgcgaatcgttattaagtccgggctgccagctcgaaagcctttgggtgaaaagctgttctttcactgctgcttcatgccagcattttagttcgatgttgacgcgcaacaagtgtcttgttgagctccaattgagcaataataaattaggtgattgtggcgtgcagcagctttgccaagggttatctcaaccaggtgcggccctccaggttttgtggttgggcgactgtgatgtaggtcatagtggctgtgcaagcttagcttccgtgttgcttgtcaaccgttccttacgcgaactcgaccttagtaacaactgcatgggcgaagaagggattctccgtttgatggagagcgttgaacaaccgggatgcgtgcttgaacagttggtcctctatgacatctactggtcggaggagatggatcgtcgtttacgtgccttagaagagcgcaaaccgtcattgcgcgtgattttc

SEQ ID NO: 512 - protein, 468 aa, synthetic construct
  REGION 1..468: note = Variant of RNase inhibitor
MHHHHHHGGSGTMSRDIQCQQLSDARWTELLPLLQQAEVVRLDDCGLTEMRCKDISSALQANPSLIELSLCTNELGDAGVTLVLQGLQSPTCKIEKLSLQNCCLTKTGCGVLGDMLRSMPTLRELYLNDNPLGDAGLQLLCSGLVDENCHLEKLQVEYCNLTAASCESLASALRAKRHFKELAVSNNELGEAGVRVLCRGLVDSACQLEVLKLENCGLTSASCEDLCRVVASKPSLQELDLGMNKLGDQGIATLCPTLLHPSCQIRVLWLWNCDITTAGCRDLCRVLRAKPSLKELSLAGNALGDEGARLLCESLLSPGCQLESLWVKSCSFTAASCQHFSSMLTRNKCLVELQLSNNKLGDCGVQQLCQGLSQPGAALQVLWLGDCDVGHSGCASLASVLLVNRSLRELDLSNNCMGEEGILRLMESVEQPGCVLEQLVLYDIYWSEEMDRRLRALEERKPSLRVIF

SEQ ID NO: 513 - DNA, 1404 bp, synthetic construct
  misc_feature 1..1404: note = Variant of RNase inhibitor
  source 1..1404: mol_type = other DNA
atgcaccatcatcatcatcatggcggtagcggcacgatgtctcgcgatattcagtgtcaacaattgtcagatgcgcgttggacggaactgttaccgcttctgcaacagagcgaagtggtgcgcctggatgactgcggcctcactgagagtcgctgcaaagacatcagtagtgcactgcaagccaacccatcgttgaccgaattaagcctgtgtacaaatgagctgggtgatgctggagttcatttagtcctgcagggcttgcagtctggcaagtgcaagattgaaaaactgtccctccagaactgttgtctgacgaagactggttgcggtgtattaggcgacatgcttcgttcaatgcccaccctgcgcgcactgtatctgaatgataacccgttgggcgatgcgggcctccagctgctttgccaagggctggtggacgaacaatgtcacctggagaaactgcaggtggaatactgcaatctcacagcagcctcgtgcgaaagcttggcgagcgctctgcgtgccaaacgccattttaaagaattagcggtttcgaacaacgaactgggtgaagcaggcgtgcgcgtactttgtcgtgggctggtggatagtgcgtgccaactggaggttctgaaactggaaaattgtggattgacctctgcctcctgcgaggatctttgtcgtgtggtcgctagcaaaccaagcctccaggaattggaccttggcatgaacaaattaggtgaccaaggcatcgcaacgttatgcccgaccctgcttcacccttcatgccagattcgtgttttgtggctctggaactgtgatatcaccaccgccggctgccgcgacctctgtcaggtattacgcgcgaagccgtccctcaaagagctgagtcttgcgggtaatgccttgggagatgaaggcgcacgtctcttgtgcgaatcgttattaagtccgggctgccagctcgaaagcctttgggtgaaaagctgttctttcactgctgcttcatgccagcattttagttcgatgttgacgcgcaacaagtgtcttgttgagctccaattgagcaataataaattaggtgattgtggcgtgcagcagctttgccaagggttatctcaaccaggtgcggccctccaggttttgtggttgggcgactgtgatgtaggtcatagtggctgtgcaagcttagcttccgtgttgcttgtcaaccgttccttacgcgaactcgaccttagtaacaactgcatgggcgaagaagggattctccgtttgatggagagcgttgaacaaccgggatgcgtgcttgaacagttggtcctctatgacatctactggtcggaggagatggatcgtcgtttacgtgccttagaagagcgcaaaccgtcattgcgcgtgattttc

SEQ ID NO: 514 - protein, 468 aa, synthetic construct
  REGION 1..468: note = Variant of RNase inhibitor
MHHHHHHGGSGTMSRDIQCQQLSDARWTELLPLLQQSEVVRLDDCGLTESRCKDISSALQANPSLTELSLCTNELGDAGVHLVLQGLQSGKCKIEKLSLQNCCLTKTGCGVLGDMLRSMPTLRALYLNDNPLGDAGLQLLCQGLVDEQCHLEKLQVEYCNLTAASCESLASALRAKRHFKELAVSNNELGEAGVRVLCRGLVDSACQLEVLKLENCGLTSASCEDLCRVVASKPSLQELDLGMNKLGDQGIATLCPTLLHPSCQIRVLWLWNCDITTAGCRDLCQVLRAKPSLKELSLAGNALGDEGARLLCESLLSPGCQLESLWVKSCSFTAASCQHFSSMLTRNKCLVELQLSNNKLGDCGVQQLCQGLSQPGAALQVLWLGDCDVGHSGCASLASVLLVNRSLRELDLSNNCMGEEGILRLMESVEQPGCVLEQLVLYDIYWSEEMDRRLRALEERKPSLRVIF

SEQ ID NO: 515 - DNA, 1404 bp, synthetic construct
  misc_feature 1..1404: note = Variant of RNase inhibitor
  source 1..1404: mol_type = other DNA
atgcaccatcatcatcatcatggcggtagcggcacgatgtctcgcgatattcagtgtcaacaattgtcagatgcgcgttggacggaactgttaccgcttctgcaacagagcgaagtggtgcgcctggatgactgcggcctcactgagagtcgctgcaaagacatcagtagtgcactgcaagccaacccatcgttgaccgaattaagcctgtgtacaaatgagctgggtgatgctggagttcatttagtcctgcagggcttgcagtctggcaagtgcaagattgaaaaactgtccctccagaactgttgtctgacgaagactggttgcggtgtattaggcgacatgcttcgttcaatgcccaccctgcgcgaactgtatctgaatgataacccgttgggcgatgcgggcctccagctgctttgccaagggctggtggacgaaaattgtcacctggagaaactgcaggtggaatactgcaatctcacagcagcctcgtgcgaaagcttggcgagcgctctgcgtgccaaacgccattttaaagaattagcggtttcgaacaacgaactgggtgaagcaggcgtgcgcgtactttgtcgtgggctggtggagagtccatgccaactggaggttctgaaactggaaaattgtggattgacctctgcctcctgcgaggatctttgtcgtgtggtcgctagcaaaccaagcctccaggaattggaccttggcatgaacaaattaggtgaccaaggcatcgcaacgttatgcccgaccctgcttcacccttcatgccagattcgtgttttgtggctctggaactgtgatatcaccaccgccggctgccgcgacctctgtcgtgtattacgcgcgaagccgtccctcaaagagctgagtcttgcgggtaatgccttgggagatgaaggcgcacgtctcttgtgcgaatcgttattagaaccggcctgccagctcgaaagcctttgggtgaaaagctgttctttcactgctgcttcatgccagcattttagttcgatgttgacgcgcaacaagtgtcttgttgagctccaattgagcaataataaattaggtgattgtggcgtgcagcagctttgccaagggttatctcaaccaggtgcggccctccaggttttgtggttgggcgactgtgatgtaggtcatagtggctgtgcaagcttagcttccgtgttgcttgtcaaccgttccttacgcgaactcgaccttagtaacaactgcatgggcgaagaagggattctccgtttgatggagagcgttgaacaaccgggatgcgtgcttgaacagttggtcctctatgacatctactggtcggaggagatggatcgtcgtttacgtgccttagaagagcgcaaaccgtcattgcgcgtgattttc

SEQ ID NO: 516 - protein, 468 aa, synthetic construct
  REGION 1..468: note = Variant of RNase inhibitor
MHHHHHHGGSGTMSRDIQCQQLSDARWTELLPLLQQSEVVRLDDCGLTESRCKDISSALQANPSLTELSLCTNELGDAGVHLVLQGLQSGKCKIEKLSLQNCCLTKTGCGVLGDMLRSMPTLRELYLNDNPLGDAGLQLLCQGLVDENCHLEKLQVEYCNLTAASCESLASALRAKRHFKELAVSNNELGEAGVRVLCRGLVESPCQLEVLKLENCGLTSASCEDLCRVVASKPSLQELDLGMNKLGDQGIATLCPTLLHPSCQIRVLWLWNCDITTAGCRDLCRVLRAKPSLKELSLAGNALGDEGARLLCESLLEPACQLESLWVKSCSFTAASCQHFSSMLTRNKCLVELQLSNNKLGDCGVQQLCQGLSQPGAALQVLWLGDCDVGHSGCASLASVLLVNRSLRELDLSNNCMGEEGILRLMESVEQPGCVLEQLVLYDIYWSEEMDRRLRALEERKPSLRVIF

SEQ ID NO: 517 - DNA, 1404 bp, synthetic construct
  misc_feature 1..1404: note = Variant of RNase inhibitor
  source 1..1404: mol_type = other DNA
atgcaccatcatcatcatcatggcggtagcggcacgatgtctcgcgatattcagtgtcaacaattgtcagatgcgcgttggcacgaactgttaccgcttctgcaacagagcgaagtggtgcgcctggatgactgcggcctcactgagatgcgctgcaaagacatcagtagtgcactgcaagccaacccatcgttgaccgaattaagcctgtgtacaaatgagctgggtgatgctggagttaccttagtcctgcagggcttgcagtctcctacctgcaagattgaaaaactgtccctccagaactgttgtctgacgaagactggttgcggtgtattaggcgacatgcttcgttcaatgcccaccctgcgcgaactgtatctgaatgataacccgttgggcgatgcgggcctccagctgctttgccaagggctggtggacgaaaattgtcacctggagaaactgcaggtggaatactgcaatctcacagcagcctcgtgcgaaagcttggcgagcgctctgcgtgccaaacgccattttaaagaattagcggtttcgaacaacgaactgggtgaagcaggcgtgcgcgtactttgtcgtgggctggtggatagtgcgtgccaactggaggttctgaaactggaaaattgtggattgacctctgcctcctgcgaggatctttgtcgtgtggtcgctagcaaaccaagcctccaggaattggaccttggcatgaacaaattaggtgaccaaggcatcgcaacgttatgcccgaccctgcttcacccttcatgccagattcgtgttttgtggctctggaactgtgatatcaccaccgccggctgccgcgacctctgtcaggtattacgcgcgaagccgtccctcaaagagctgagtcttgcgggtaatgccttgggagatgaaggcgcacgtctcttgtgcgaatcgttattaagtccgggctgccagctcgaaagcctttgggtgaaaagctgttctttcactgctgcttcatgccagcattttagttcgatgttgacgcgcaacaagtgtcttgttgagctccaattgagcaataataaattaggtgattgtggcgtgcagcagctttgccaagggttatctcaaccaggtgcggccctccaggttttgtggttgggcgactgtgatgtaggtcatagtggctgtgcaagcttagcttccgtgttgcttgtcaaccgttccttacgcgaactcgaccttagtaacaactgcatgggcgaagaagggattctccgtttgatggagagcgttgaacaaccgggatgcgtgcttgaacagttggtcctctatgacatctactggtcggaggagatggatcgtcgtttacgtgccttagaagagcgcaaaccgtcattgcgcgtgattttc

SEQ ID NO: 518 - protein, 468 aa, synthetic construct
  REGION 1..468: note = Variant of RNase inhibitor
MHHHHHHGGSGTMSRDIQCQQLSDARWHELLPLLQQSEVVRLDDCGLTEMRCKDISSALQANPSLTELSLCTNELGDAGVTLVLQGLQSPTCKIEKLSLQNCCLTKTGCGVLGDMLRSMPTLRELYLNDNPLGDAGLQLLCQGLVDENCHLEKLQVEYCNLTAASCESLASALRAKRHFKELAVSNNELGEAGVRVLCRGLVDSACQLEVLKLENCGLTSASCEDLCRVVASKPSLQELDLGMNKLGDQGIATLCPTLLHPSCQIRVLWLWNCDITTAGCRDLCQVLRAKPSLKELSLAGNALGDEGARLLCESLLSPGCQLESLWVKSCSFTAASCQHFSSMLTRNKCLVELQLSNNKLGDCGVQQLCQGLSQPGAALQVLWLGDCDVGHSGCASLASVLLVNRSLRELDLSNNCMGEEGILRLMESVEQPGCVLEQLVLYDIYWSEEMDRRLRALEERKPSLRVIF

SEQ ID NO: 519 - DNA, 1404 bp, synthetic construct
  misc_feature 1..1404: note = Variant of RNase inhibitor
  source 1..1404: mol_type = other DNA
atgcaccatcatcatcatcatggcggtagcggcacgatgtctcgcgatattcagtgtcaacaattgtcagatgcgcgttggcacgaactgttaccgcttctgcaacagagcgaagtggtgcgcctggatgactgcggcctcactgagagtcgctgcaaagacatcagtagtgcactgcaagccaacccatcgttgatcgaattaagcctgtgtacaaatgagctgggtgatgctggagttcatttagtcctgcagggcttgcagtctggcaagtgcaagattgaaaaactgtccctccagaactgttgtctgacgaagactggttgcggtgtattaggcgacatgcttcgttcaatgcccaccctgcgcgaactgtatctgaatgataacccgttgggcgatgcgggcctccagctgctttgctccgggctggtggacccgcaatgtcacctggagaaactgcaggtggaatactgcaatctcacagcagcctcgtgcgaaagcttggcgagcgctctgcgtgccaaacgccattttaaagaattagcggtttcgaacaacgaactgggtgaagcaggcgtgcgcgtactttgtcgtgggctggtggagagtgcatgccaactggaggttctgaaactggaaaattgtggattgacctctgcctcctgcgaggatctttgtcgtgtggtcgctagcaaaccaagcctccaggaattggaccttggcatgaacaaattaggtgaccaaggcatcgcaacgttatgcccgaccctgcttcacccttcatgccagattcgtgttttgtggctctggaactgtgatatcaccaccgccggctgccgcgacctctgtcaggtattacgcgcgaagccgtccctcaaagagctgagtcttgcgggtaatgccttgggagatgaaggcgcacgtctcttgtgcgaatcgttattagaaccgggctgccagctcgaaagcctttgggtgaaaagctgttctttcactgctgcttcatgccagcattttagttcgatgttgacgcgcaacaagtgtcttgttgagctccaattgagcaataataaattaggtgattgtggcgtgcagcagctttgccaagggttatctcaaccaggtgcggccctccaggttttgtggttgggcgactgtgatgtaggtcatagtggctgtgcaagcttagcttccgtgttgcttgtcaaccgttccttacgcgaactcgaccttagtaacaactgcatgggcgaagaagggattctccgtttgatggagagcgttgaacaaccgggatgcgtgcttgaacagttggtcctctatgacatctactggtcggaggagatggatcgtcgtttacgtgccttagaagagcgcaaaccgtcattgcgcgtgattttc

SEQ ID NO: 520 - protein, 468 aa, synthetic construct
  REGION 1..468: note = Variant of RNase inhibitor
MHHHHHHGGSGTMSRDIQCQQLSDARWHELLPLLQQSEVVRLDDCGLTESRCKDISSALQANPSLIELSLCTNELGDAGVHLVLQGLQSGKCKIEKLSLQNCCLTKTGCGVLGDMLRSMPTLRELYLNDNPLGDAGLQLLCSGLVDPQCHLEKLQVEYCNLTAASCESLASALRAKRHFKELAVSNNELGEAGVRVLCRGLVESACQLEVLKLENCGLTSASCEDLCRVVASKPSLQELDLGMNKLGDQGIATLCPTLLHPSCQIRVLWLWNCDITTAGCRDLCQVLRAKPSLKELSLAGNALGDEGARLLCESLLEPGCQLESLWVKSCSFTAASCQHFSSMLTRNKCLVELQLSNNKLGDCGVQQLCQGLSQPGAALQVLWLGDCDVGHSGCASLASVLLVNRSLRELDLSNNCMGEEGILRLMESVEQPGCVLEQLVLYDIYWSEEMDRRLRALEERKPSLRVIF

SEQ ID NO: 521 - DNA, 1404 bp, synthetic construct
  misc_feature 1..1404: note = Variant of RNase inhibitor
  source 1..1404: mol_type = other DNA
atgcaccatcatcatcatcatggcggtagcggcacgatgtctcgcgatattcagtgtcaacaattgtcagatgcgcgttggactgaactgttaccgcttctgcaacagtcggaagtggtgcgcctggatgactgcggcctcactgagatgcgctgcaaagacatcagtagtgcactgcaagccaacccatcgttgatcgaattaagcctgtgtacaaatgagctgggtgatgctggagttcacttagtcctgcagggcttgcagtctggcaagtgcaagattgaaaaactgtccctccagaactgttgtctgacgaagactggttgcggtgtattaggcgacatgcttcgttcaatgcccaccctgcgcgaactgtatctgaatgataacccgttgggcgatgcgggcctccagctgctttgctccgggctggtggacgaaaattgtcacctggagaaactgcaggtggaatactgcaatctcacagcagcctcgtgcgaaagcttggcgagcgctctgcgtgccaaacgccattttaaagaattagcggtttcgaacaacgaactgggtgaagcaggcgtgcgcgtactttgtcgtgggctggtggatagtccatgccaactggaggttctgaaactggaaaattgtggattgacctctgcctcctgcgaggatctttgtcgtgtggtcgctagcaaaccaagcctccaggaattggaccttggcatgaacaaattaggtgaccaaggcatcgcaacgttatgcccgaccctgcttcacccttcatgccagattcgtgttttgtggctctggaactgtgatatcaccaccgccggctgccgcgacctctgtcaggtattacgcgcgaagccgtccctcaaagagctgagtcttgcgggtaatgccttgggagatgaaggcgcacgtctcttgtgcgaatcgttattagaaccggcctgccagctcgaaagcctttgggtgaaaagctgttctttcactgctgcttcatgccagcattttagttcgatgttgacgcgcaacaagtgtcttgttgagctccaattgagcaataataaattaggtgattgtggcgtgcagcagctttgccaagggttatctcaaccaggtgcggccctccaggttttgtggttgggcgactgtgatgtaggtcatagtggctgtgcaagcttagcttccgtgttgcttgtcaaccgttccttacgcgaactcgaccttagtaacaactgcatgggcgaagaagggattctccgtttgatggagagcgttgaacaaccgggatgcgtgcttgaacagttggtcctctatgacatctactggtcggaggagatggatcgtcgtttacgtgccttagaagagcgcaaaccgtcattgcgcgtgattttc

SEQ ID NO: 522 - protein, 468 aa, synthetic construct
  REGION 1..468: note = Variant of RNase inhibitor
MHHHHHHGGSGTMSRDIQCQQLSDARWTELLPLLQQSEVVRLDDCGLTEMRCKDISSALQANPSLIELSLCTNELGDAGVHLVLQGLQSGKCKIEKLSLQNCCLTKTGCGVLGDMLRSMPTLRELYLNDNPLGDAGLQLLCSGLVDENCHLEKLQVEYCNLTAASCESLASALRAKRHFKELAVSNNELGEAGVRVLCRGLVDSPCQLEVLKLENCGLTSASCEDLCRVVASKPSLQELDLGMNKLGDQGIATLCPTLLHPSCQIRVLWLWNCDITTAGCRDLCQVLRAKPSLKELSLAGNALGDEGARLLCESLLEPACQLESLWVKSCSFTAASCQHFSSMLTRNKCLVELQLSNNKLGDCGVQQLCQGLSQPGAALQVLWLGDCDVGHSGCASLASVLLVNRSLRELDLSNNCMGEEGILRLMESVEQPGCVLEQLVLYDIYWSEEMDRRLRALEERKPSLRVIF

SEQ ID NO: 523 - DNA, 1404 bp, synthetic construct
  misc_feature 1..1404: note = Variant of RNase inhibitor
  source 1..1404: mol_type = other DNA
atgcaccatcatcatcatcatggcggtagcggcacgatgtctcgcgatattcagtgtcaacaattgtcagatgcgcgttggcacgaactgttaccgcttctgcaacagagcgaagtggtgcgcctggatgactgcggcctcactgagatgcgctgcaaagacatcagtagtgcactgcaagccaacccatcgttgaccgaattaagcctgtgtacaaatgagctgggtgatgctggagttcatttagtcctgcagggcttgcagtctggcaagtgcaagattgaaaaactgtccctccagaactgttgtctgacgaagactggttgcggtgtattaggcgacatgcttcgttcaatgcccaccctgcgcgaactgtatctgaatgataacccgttgggcgatgcgggcctccagctgctttgccaagggctggtggacgaaaattgtcacctggagaaactgcaggtggaatactgcaatctcacagcagcctcgtgcgaaagcttggcgagcgctctgcgtgccaaacgccattttaaagaattagcggtttcgaacaacgaactgggtgaagcaggcgtgcgcgtactttgtcgtgggctggtggatagtgcgtgccaactggaggttctgaaactggaaaattgtggattgacctctgcctcctgcgaggatctttgtcgtgtggtcgctagcaaaccaagcctccaggaattggaccttggcatgaacaaattaggtgaccaaggcatcgcaacgttatgcccgaccctgcttcacccttcatgccagattcgtgttttgtggctctggaactgtgatatcaccaccgccggctgccgcgacctctgtcaggtattacgcgcgaagccgtccctcaaagagctgagtcttgcgggtaatgccttgggagatgaaggcgcacgtctcttgtgcgaatcgttattaagtccgggctgccagctcgaaagcctttgggtgaaaagctgttctttcactgctgcttcatgccagcattttagttcgatgttgacgcgcaacaagtgtcttgttgagctccaattgagcaataataaattaggtgattgtggcgtgcagcagctttgccaagggttatctcaaccaggtgcggccctccaggttttgtggttgggcgactgtgatgtaggtcatagtggctgtgcaagcttagcttccgtgttgcttgtcaaccgttccttacgcgaactcgaccttagtaacaactgcatgggcgaagaagggattctccgtttgatggagagcgttgaacaaccgggatgcgtgcttgaacagttggtcctctatgacatctactggtcggaggagatggatcgtcgtttacgtgccttagaagagcgcaaaccgtcattgcgcgtgattttc

SEQ ID NO: 524 - protein, 468 aa, synthetic construct
  REGION 1..468: note = Variant of RNase inhibitor
MHHHHHHGGSGTMSRDIQCQQLSDARWHELLPLLQQSEVVRLDDCGLTEMRCKDISSALQANPSLTELSLCTNELGDAGVHLVLQGLQSGKCKIEKLSLQNCCLTKTGCGVLGDMLRSMPTLRELYLNDNPLGDAGLQLLCQGLVDENCHLEKLQVEYCNLTAASCESLASALRAKRHFKELAVSNNELGEAGVRVLCRGLVDSACQLEVLKLENCGLTSASCEDLCRVVASKPSLQELDLGMNKLGDQGIATLCPTLLHPSCQIRVLWLWNCDITTAGCRDLCQVLRAKPSLKELSLAGNALGDEGARLLCESLLSPGCQLESLWVKSCSFTAASCQHFSSMLTRNKCLVELQLSNNKLGDCGVQQLCQGLSQPGAALQVLWLGDCDVGHSGCASLASVLLVNRSLRELDLSNNCMGEEGILRLMESVEQPGCVLEQLVLYDIYWSEEMDRRLRALEERKPSLRVIF

SEQ ID NO: 525 - DNA, 1404 bp, synthetic construct
  misc_feature 1..1404: note = Variant of RNase inhibitor
  source 1..1404: mol_type = other DNA
atgcaccatcatcatcatcatggcggtagcggcacgatgtctcgcgatattcagtgtcaacaattgtcagatgcgcgttggacggaactgttaccgcttctgcaacaggcggaagtggtgcgcctggatgactgcggcctcactgagatgcgctgcaaagacatcagtagtgcactgcaagccaacccatcgttgaccgaattaagcctgtgtacaaatgagctgggtgatgctggagttcatttagtcctgcagggcttgcagtctcctaagtgcaagattgaaaaactgtccctccagaactgttgtctgacgaagactggttgcggtgtattaggcgacatgcttcgttcaatgcccaccctgcgcgaactgtatctgaatgataacccgttgggcgatgcgggcctccagctgctttgctcggggctggtggacccaaattgtcacctggagaaactgcaggtggaatactgcaatctcacagcagcctcgtgcgaaagcttggcgagcgctctgcgtgccaaacgccattttaaagaattagcggtttcgaacaacgaactgggtgaagcaggcgtgcgcgtactttgtcgtgggctggtggatagtgcgtgccaactggaggttctgaaactggaaaattgtggattgacctctgcctcctgcgaggatctttgtcgtgtggtcgctagcaaaccaagcctccaggaattggaccttggcatgaacaaattaggtgaccaaggcatcgcaacgttatgcccgaccctgcttcacccttcatgccagattcgtgttttgtggctctggaactgtgatatcaccaccgccggctgccgcgacctctgtcaggtattacgcgcgaagccgtccctcaaagagctgagtcttgcgggtaatgccttgggagatgaaggcgcacgtctcttgtgcgaatcgttattagaaccgggctgccagctcgaaagcctttgggtgaaaagctgttctttcactgctgcttcatgccagcattttagttcgatgttgacgcgcaacaagtgtcttgttgagctccaattgagcaataataaattaggtgattgtggcgtgcagcagctttgccaagggttatctcaaccaggtgcggccctccaggttttgtggttgggcgactgtgatgtaggtcatagtggctgtgcaagcttagcttccgtgttgcttgtcaaccgttccttacgcgaactcgaccttagtaacaactgcatgggcgaagaagggattctccgtttgatggagagcgttgaacaaccgggatgcgtgcttgaacagttggtcctctatgacatctactggtcggaggagatggatcgtcgtttacgtgccttagaagagcgcaaaccgtcattgcgcgtgattttc

SEQ ID NO: 526 - protein, 468 aa, synthetic construct
  REGION 1..468: note = Variant of RNase inhibitor
MHHHHHHGGSGTMSRDIQCQQLSDARWTELLPLLQQAEVVRLDDCGLTEMRCKDISSALQANPSLTELSLCTNELGDAGVHLVLQGLQSPKCKIEKLSLQNCCLTKTGCGVLGDMLRSMPTLRELYLNDNPLGDAGLQLLCSGLVDPNCHLEKLQVEYCNLTAASCESLASALRAKRHFKELAVSNNELGEAGVRVLCRGLVDSACQLEVLKLENCGLTSASCEDLCRVVASKPSLQELDLGMNKLGDQGIATLCPTLLHPSCQIRVLWLWNCDITTAGCRDLCQVLRAKPSLKELSLAGNALGDEGARLLCESLLEPGCQLESLWVKSCSFTAASCQHFSSMLTRNKCLVELQLSNNKLGDCGVQQLCQGLSQPGAALQVLWLGDCDVGHSGCASLASVLLVNRSLRELDLSNNCMGEEGILRLMESVEQPGCVLEQLVLYDIYWSEEMDRRLRALEERKPSLRVIF

SEQ ID NO: 527 - DNA, 1404 bp, synthetic construct
  misc_feature 1..1404: note = Variant of RNase inhibitor
  source 1..1404: mol_type = other DNA
atgcaccatcatcatcatcatggcggtagcggcacgatgtctctggatattcagtgtcaacaattgtcagatgcgcgttggacggaactgttaccgcttctgcaacagagcgaagtggtgcgcctggatgactgcggcctcactgagatgcgctgcaaagacatcagtagtgcactgcaagccaacccatcgttgaccgaattaagcctgtgtacaaatgagctgggtgatgctggagttaccttagtcctgcagggcttgcagtctcctacctgcaagattgaaaaactgtccctccagaactgttgtctgacgaagactggttgcggtgtattaggcgacatgcttcgttcaatgcccaccctgcgcgaactgtatctgaatgataacccgttgggcgatgcgggcctccagctgctttgctccgggctggtggacgaaaattgtcacctggagaaactgcaggtggaatactgcaatctcacagcagcctcgtgcgaaagcttggcgagcgctctgcgtgccaaacgccattttaaagaattagcggtttcgaacaacgaactgggtgaagcaggcgtgcgcgtactttgtcgtgggctggtggagagtccatgccaactggaggttctgaaactggaaaattgtggattgacctctgcctcctgcgaggatctttgtcgtgtggtcgctagcaaaccaagcctccaggaattggaccttggcatgaacaaattaggtgaccaaggcatcgcaacgttatgcccgaccctgcttcacccttcatgccagattcgtgttttgtggctctggaactgtgatatcaccaccgccggctgccgcgacctctgtcgcgtattacgcgcgaagccgtccctcaaagagctgagtcttgcgggtaatgccttgggagatgaaggcgcacgtctcttgtgcgaatcgttattagaaccggcgtgccagctcgaaagcctttgggtgaaaagctgttctttcactgctgcttcatgccagcattttagttcgatgttgacgcgcaacaagtgtcttgttgagctccaattgagcaataataaattaggtgattgtggcgtgcagcagctttgccaagggttatctcaaccaggtgcggccctccaggttttgtggttgggcgactgtgatgtaggtcatagtggctgtgcaagcttagcttccgtgttgcttgtcaaccgttccttacgcgaactcgaccttagtaacaactgcatgggcgaagaagggattctccgtttgatggagagcgttgaacaaccgggatgcgtgcttgaacagttggtcctctatgacatctactggtcggaggagatggatcgtcgtttacgtgccttagaagagcgcaaaccgtcattgcgcgtgattttc

SEQ ID NO: 528 - protein, 468 aa, synthetic construct
  REGION 1..468: note = Variant of RNase inhibitor
MHHHHHHGGSGTMSLDIQCQQLSDARWTELLPLLQQSEVVRLDDCGLTEMRCKDISSALQANPSLTELSLCTNELGDAGVTLVLQGLQSPTCKIEKLSLQNCCLTKTGCGVLGDMLRSMPTLRELYLNDNPLGDAGLQLLCSGLVDENCHLEKLQVEYCNLTAASCESLASALRAKRHFKELAVSNNELGEAGVRVLCRGLVESPCQLEVLKLENCGLTSASCEDLCRVVASKPSLQELDLGMNKLGDQGIATLCPTLLHPSCQIRVLWLWNCDITTAGCRDLCRVLRAKPSLKELSLAGNALGDEGARLLCESLLEPACQLESLWVKSCSFTAASCQHFSSMLTRNKCLVELQLSNNKLGDCGVQQLCQGLSQPGAALQVLWLGDCDVGHSGCASLASVLLVNRSLRELDLSNNCMGEEGILRLMESVEQPGCVLEQLVLYDIYWSEEMDRRLRALEERKPSLRVIF

SEQ ID NO: 529 - DNA, 1404 bp, synthetic construct
  misc_feature 1..1404: note = Variant of RNase inhibitor
  source 1..1404: mol_type = other DNA
atgcaccatcatcatcatcatggcggtagcggcacgatgtctctggatattcagtgtcaacaattgtcagatgcgcgttggactgaactgttaccgcttctgcaacagagcgaagtggtgcgcctggatgactgcggcctcactgagatgcgctgcaaagacatcagtagtgcactgcaagccaacccatcgttgaccgaattaagcctgtgtacaaatgagctgggtgatgctggagttcatttagtcctgcagggcttgcagtctcctacctgcaagattgaaaaactgtccctccagaactgttgtctgacgaagactggttgcggtgtattaggcgacatgcttcgttcaatgcccaccctgcgcgaactgtatctgaatgataacccgttgggcgatgcgggcctccagctgctttgctccgggctggtggacgaaaattgtcacctggagaaactgcaggtggaatactgcaatctcacagcagcctcgtgcgaaagcttggcgagcgctctgcgtgccaaacgccattttaaagaattagcggtttcgaacaacgaactgggtgaagcaggcgtgcgcgtactttgtcgtgggctggtggatagtgcgtgccaactggaggttctgaaactggaaaattgtggattgacctctgcctcctgcgaggatctttgtcgtgtggtcgctagcaaaccaagcctccaggaattggaccttggcatgaacaaattaggtgaccaaggcatcgcaacgttatgcccgaccctgcttcacccttcatgccagattcgtgttttgtggctctggaactgtgatatcaccaccgccggctgccgcgacctctgtcaggtattacgcgcgaagccgtccctcaaagagctgagtcttgcgggtaatgccttgggagatgaaggcgcacgtctcttgtgcgaatcgttattagaaccgggctgccagctcgaaagcctttgggtgaaaagctgttctttcactgctgcttcatgccagcattttagttcgatgttgacgcgcaacaagtgtcttgttgagctccaattgagcaataataaattaggtgattgtggcgtgcagcagctttgccaagggttatctcaaccaggtgcggccctccaggttttgtggttgggcgactgtgatgtaggtcatagtggctgtgcaagcttagcttccgtgttgcttgtcaaccgttccttacgcgaactcgaccttagtaacaactgcatgggcgaagaagggattctccgtttgatggagagcgttgaacaaccgggatgcgtgcttgaacagttggtcctctatgacatctactggtcggaggagatggatcgtcgtttacgtgccttagaagagcgcaaaccgtcattgcgcgtgattttc

SEQ ID NO: 530 - protein, 468 aa, synthetic construct
  REGION 1..468: note = Variant of RNase inhibitor
MHHHHHHGGSGTMSLDIQCQQLSDARWTELLPLLQQSEVVRLDDCGLTEMRCKDISSALQANPSLTELSLCTNELGDAGVHLVLQGLQSPTCKIEKLSLQNCCLTKTGCGVLGDMLRSMPTLRELYLNDNPLGDAGLQLLCSGLVDENCHLEKLQVEYCNLTAASCESLASALRAKRHFKELAVSNNELGEAGVRVLCRGLVDSACQLEVLKLENCGLTSASCEDLCRVVASKPSLQELDLGMNKLGDQGIATLCPTLLHPSCQIRVLWLWNCDITTAGCRDLCQVLRAKPSLKELSLAGNALGDEGARLLCESLLEPGCQLESLWVKSCSFTAASCQHFSSMLTRNKCLVELQLSNNKLGDCGVQQLCQGLSQPGAALQVLWLGDCDVGHSGCASLASVLLVNRSLRELDLSNNCMGEEGILRLMESVEQPGCVLEQLVLYDIYWSEEMDRRLRALEERKPSLRVIF

SEQ ID NO: 531 - DNA, 1404 bp, synthetic construct
  misc_feature 1..1404: note = Variant of RNase inhibitor
  source 1..1404: mol_type = other DNA
atgcaccatcatcatcatcatggcggtagcggcacgatgtctcgcgatattcagtgtcaacaattgtcagatgcgcgttggacggaactgttaccgcttctgcaacagagcgaagtggtgcgcctggatgactgcggcctcactgagagtcgctgcaaagacatcagtagtgcactgcaagccaacccatcgttgaccgaattaagcctgtgtacaaatgagctgggtgatgctggagttcatttagtcctgcagggcttgcagtctggcacgtgcaagattgaaaaactgtccctccagaactgttgtctgacgaagactggttgcggtgtattaggcgacatgcttcgttcaatgcccaccctgcgcgaactgtatctgaatgataacccgttgggcgatgcgggcctccagctgctttgctccgggctggtggacgaaaattgtcacctggagaaactgcaggtggaatactgcaatctcacagcagcctcgtgcgaaagcttggcgagcgctctgcgtgccaaacgccattttaaagaattagcggtttcgaacaacgaactgggtgaagcaggcgtgcgcgtactttgtcgtgggctggtggatagtgcgtgccaactggaggttctgaaactggaaaattgtggattgacctctgcctcctgcgaggatctttgtcgtgtggtcgctagcaaaccaagcctccaggaattggaccttggcatgaacaaattaggtgaccaaggcatcgcaacgttatgcccgaccctgcttcacccttcatgccagattcgtgttttgtggctctggaactgtgatatcaccaccgccggctgccgcgacctctgtcgtgtattacgcgcgaagccgtccctcaaagagctgagtcttgcgggtaatgccttgggagatgaaggcgcacgtctcttgtgcgaatcgttattagaaccggcgtgccagctcgaaagcctttgggtgaaaagctgttctttcactgctgcttcatgccagcattttagttcgatgttgacgcgcaacaagtgtcttgttgagctccaattgagcaataataaattaggtgattgtggcgtgcagcagctttgccaagggttatctcaaccaggtgcggccctccaggttttgtggttgggcgactgtgatgtaggtcatagtggctgtgcaagcttagcttccgtgttgcttgtcaaccgttccttacgcgaactcgaccttagtaacaactgcatgggcgaagaagggattctccgtttgatggagagcgttgaacaaccgggatgcgtgcttgaacagttggtcctctatgacatctactggtcggaggagatggatcgtcgtttacgtgccttagaagagcgcaaaccgtcattgcgcgtgattttc

SEQ ID NO: 532 - protein, 468 aa, synthetic construct
  REGION 1..468: note = Variant of RNase inhibitor
MHHHHHHGGSGTMSRDIQCQQLSDARWTELLPLLQQSEVVRLDDCGLTESRCKDISSALQANPSLTELSLCTNELGDAGVHLVLQGLQSGTCKIEKLSLQNCCLTKTGCGVLGDMLRSMPTLRELYLNDNPLGDAGLQLLCSGLVDENCHLEKLQVEYCNLTAASCESLASALRAKRHFKELAVSNNELGEAGVRVLCRGLVDSACQLEVLKLENCGLTSASCEDLCRVVASKPSLQELDLGMNKLGDQGIATLCPTLLHPSCQIRVLWLWNCDITTAGCRDLCRVLRAKPSLKELSLAGNALGDEGARLLCESLLEPACQLESLWVKSCSFTAASCQHFSSMLTRNKCLVELQLSNNKLGDCGVQQLCQGLSQPGAALQVLWLGDCDVGHSGCASLASVLLVNRSLRELDLSNNCMGEEGILRLMESVEQPGCVLEQLVLYDIYWSEEMDRRLRALEERKPSLRVIF

SEQ ID NO: 533 - DNA, 1404 bp, synthetic construct
  misc_feature 1..1404: note = Variant of RNase inhibitor
  source 1..1404: mol_type = other DNA
atgcaccatcatcatcatcatggcggtagcggcacgatgtctcgcgatattcagtgtcaacaattgtcagatgcgcgttggacggaactgttaccgcttctgcaacagagcgaagtggtgcgcctggatgactgcggcctcactgagatgcgctgcaaagacatcagtagtgcactgcaagccaacccatcgttgatcgaattaagcctgtgtacaaatgagctgggtgatgctggagttaccttagtcctgcagggcttgcagtctggcacgtgcaagattgaaaaactgtccctccagaactgttgtctgacgaagactggttgcggtgtattaggcgacatgcttcgttcaatgcccaccctgcgcgaactgtatctgaatgataacccgttgggcgatgcgggcctccagctgctttgctccgggctggtggacccgcaatgtcacctggagaaactgcaggtggaatactgcaatctcacagcagcctcgtgcgaaagcttggcgagcgctctgcgtgccaaacgccattttaaagaattagcggtttcgaacaacgaactgggtgaagcaggcgtgcgcgtactttgtcgtgggctggtggatagtgcatgccaactggaggttctgaaactggaaaattgtggattgacctctgcctcctgcgaggatctttgtcgtgtggtcgctagcaaaccaagcctccaggaattggaccttggcatgaacaaattaggtgaccaaggcatcgcaacgttatgcccgaccctgcttcacccttcatgccagattcgtgttttgtggctctggaactgtgatatcaccaccgccggctgccgcgacctctgtcaggtattacgcgcgaagccgtccctcaaagagctgagtcttgcgggtaatgccttgggagatgaaggcgcacgtctcttgtgcgaatcgttattagaaccgggctgccagctcgaaagcctttgggtgaaaagctgttctttcactgctgcttcatgccagcattttagttcgatgttgacgcgcaacaagtgtcttgttgagctccaattgagcaataataaattaggtgattgtggcgtgcagcagctttgccaagggttatctcaaccaggtgcggccctccaggttttgtggttgggcgactgtgatgtaggtcatagtggctgtgcaagcttagcttccgtgttgcttgtcaaccgttccttacgcgaactcgaccttagtaacaactgcatgggcgaagaagggattctccgtttgatggagagcgttgaacaaccgggatgcgtgcttgaacagttggtcctctatgacatctactggtcggaggagatggatcgtcgtttacgtgccttagaagagcgcaaaccgtcattgcgcgtgattttc

SEQ ID NO: 534 - protein, 468 aa, synthetic construct
  REGION 1..468: note = Variant of RNase inhibitor
MHHHHHHGGSGTMSRDIQCQQLSDARWTELLPLLQQSEVVRLDDCGLTEMRCKDISSALQANPSLIELSLCTNELGDAGVTLVLQGLQSGTCKIEKLSLQNCCLTKTGCGVLGDMLRSMPTLRELYLNDNPLGDAGLQLLCSGLVDPQCHLEKLQVEYCNLTAASCESLASALRAKRHFKELAVSNNELGEAGVRVLCRGLVDSACQLEVLKLENCGLTSASCEDLCRVVASKPSLQELDLGMNKLGDQGIATLCPTLLHPSCQIRVLWLWNCDITTAGCRDLCQVLRAKPSLKELSLAGNALGDEGARLLCESLLEPGCQLESLWVKSCSFTAASCQHFSSMLTRNKCLVELQLSNNKLGDCGVQQLCQGLSQPGAALQVLWLGDCDVGHSGCASLASVLLVNRSLRELDLSNNCMGEEGILRLMESVEQPGCVLEQLVLYDIYWSEEMDRRLRALEERKPSLRVIF

SEQ ID NO: 535 - DNA, 1404 bp, synthetic construct
  misc_feature 1..1404: note = Variant of RNase inhibitor
  source 1..1404: mol_type = other DNA
atgcaccatcatcatcatcatggcggtagcggcacgatgtctctggatattcagtgtcaacaattgtcagatgcgcgttggacggaactgttaccgcttctgcaacagagcgaagtggtgcgcctggatgactgcggcctcactgagagtcgctgcaaagacatcagtagtgcactgcaagccaacccatcgttgaccgaattaagcctgtgtacaaatgagctgggtgatgctggagttaccttagtcctgcagggcttgcagtctcctacctgcaagattgaaaaactgtccctccagaactgttgtctgacgaagactggttgcggtgtattaggcgacatgcttcgttcaatgcccaccctgcgcgaactgtatctgaatgataacccgttgggcgatgcgggcctccagctgctttgctccgggctggtggacgaaaattgtcacctggagaaactgcaggtggaatactgcaatctcacagcagcctcgtgcgaaagcttggcgagcgctctgcgtgccaaacgccattttaaagaattagcggtttcgaacaacgaactgggtgaagcaggcgtgcgcgtactttgtcgtgggctggtggatagtgcatgccaactggaggttctgaaactggaaaattgtggattgacctctgcctcctgcgaggatctttgtcgtgtggtcgctagcaaaccaagcctccaggaattggaccttggcatgaacaaattaggtgaccaaggcatcgcaacgttatgcccgaccctgcttcacccttcatgccagattcgtgttttgtggctctggaactgtgatatcaccaccgccggctgccgcgacctctgtcaggtattacgcgcgaagccgtccctcaaagagctgagtcttgcgggtaatgccttgggagatgaaggcgcacgtctcttgtgcgaatcgttattagaaccggcgtgccagctcgaaagcctttgggtgaaaagctgttctttcactgctgcttcatgccagcattttagttcgatgttgacgcgcaacaagtgtcttgttgagctccaattgagcaataataaattaggtgattgtggcgtgcagcagctttgccaagggttatctcaaccaggtgcggccctccaggttttgtggttgggcgactgtgatgtaggtcatagtggctgtgcaagcttagcttccgtgttgcttgtcaaccgttccttacgcgaactcgaccttagtaacaactgcatgggcgaagaagggattctccgtttgatggagagcgttgaacaaccgggatgcgtgcttgaacagttggtcctctatgacatctactggtcggaggagatggatcgtcgtttacgtgccttagaagagcgcaaaccgtcattgcgcgtgattttc

SEQ ID NO: 536 - protein, 468 aa, synthetic construct
  REGION 1..468: note = Variant of RNase inhibitor
MHHHHHHGGSGTMSLDIQCQQLSDARWTELLPLLQQSEVVRLDDCGLTESRCKDISSALQANPSLTELSLCTNELGDAGVTLVLQGLQSPTCKIEKLSLQNCCLTKTGCGVLGDMLRSMPTLRELYLNDNPLGDAGLQLLCSGLVDENCHLEKLQVEYCNLTAASCESLASALRAKRHFKELAVSNNELGEAGVRVLCRGLVDSACQLEVLKLENCGLTSASCEDLCRVVASKPSLQELDLGMNKLGDQGIATLCPTLLHPSCQIRVLWLWNCDITTAGCRDLCQVLRAKPSLKELSLAGNALGDEGARLLCESLLEPACQLESLWVKSCSFTAASCQHFSSMLTRNKCLVELQLSNNKLGDCGVQQLCQGLSQPGAALQVLWLGDCDVGHSGCASLASVLLVNRSLRELDLSNNCMGEEGILRLMESVEQPGCVLEQLVLYDIYWSEEMDRRLRALEERKPSLRVIF

SEQ ID NO: 537 - DNA, 1404 bp, synthetic construct
  misc_feature 1..1404: note = Variant of RNase inhibitor
  source 1..1404: mol_type = other DNA
atgcaccatcatcatcatcatggcggtagcggcacgatgtctctggatattcagtgtcaacaattgtcagatgcgcgttggacggaactgttaccgcttctgcaacaggcggaagtggtgcgcctggatgactgcggcctcactgagatgcgctgcaaagacatcagtagtgcactgcaagccaacccatcgttgaccgaattaagcctgtgtacaaatgagctgggtgatgctggagttcatttagtcctgcagggcttgcagtctcctacctgcaagattgaaaaactgtccctccagaactgttgtctgacgaagactggttgcggtgtattaggcgacatgcttcgttcaatgcccaccctgcgcgaactgtatctgaatgataacccgttgggcgatgcgggcctccagctgctttgctccgggctggtggacgaaaattgtcacctggagaaactgcaggtggaatactgcaatctcacagcagcctcgtgcgaaagcttggcgagcgctctgcgtgccaaacgccattttaaagaattagcggtttcgaacaacgaactgggtgaagcaggcgtgcgcgtactttgtcgtgggctggtggatagtgcgtgccaactggaggttctgaaactggaaaattgtggattgacctctgcctcctgcgaggatctttgtcgtgtggtcgctagcaaaccaagcctccaggaattggaccttggcatgaacaaattaggtgaccaaggcatcgcaacgttatgcccgaccctgcttcacccttcatgccagattcgtgttttgtggctctggaactgtgatatcaccaccgccggctgccgcgacctctgtcaggtattacgcgcgaagccgtccctcaaagagctgagtcttgcgggtaatgccttgggagatgaaggcgcacgtctcttgtgcgaatcgttattagaaccggcgtgccagctcgaaagcctttgggtgaaaagctgttctttcactgctgcttcatgccagcattttagttcgatgttgacgcgcaacaagtgtcttgttgagctccaattgagcaataataaattaggtgattgtggcgtgcagcagctttgccaagggttatctcaaccaggtgcggccctccaggttttgtggttgggcgactgtgatgtaggtcatagtggctgtgcaagcttagcttccgtgttgcttgtcaaccgttccttacgcgaactcgaccttagtaacaactgcatgggcgaagaagggattctccgtttgatggagagcgttgaacaaccgggatgcgtgcttgaacagttggtcctctatgacatctactggtcggaggagatggatcgtcgtttacgtgccttagaagagcgcaaaccgtcattgcgcgtgattttc

SEQ ID NO: 538 - protein, 468 aa, synthetic construct
  REGION 1..468: note = Variant of RNase inhibitor
MHHHHHHGGSGTMSLDIQCQQLSDARWTELLPLLQQAEVVRLDDCGLTEMRCKDISSALQANPSLTELSLCTNELGDAGVHLVLQGLQSPTCKIEKLSLQNCCLTKTGCGVLGDMLRSMPTLRELYLNDNPLGDAGLQLLCSGLVDENCHLEKLQVEYCNLTAASCESLASALRAKRHFKELAVSNNELGEAGVRVLCRGLVDSACQLEVLKLENCGLTSASCEDLCRVVASKPSLQELDLGMNKLGDQGIATLCPTLLHPSCQIRVLWLWNCDITTAGCRDLCQVLRAKPSLKELSLAGNALGDEGARLLCESLLEPACQLESLWVKSCSFTAASCQHFSSMLTRNKCLVELQLSNNKLGDCGVQQLCQGLSQPGAALQVLWLGDCDVGHSGCASLASVLLVNRSLRELDLSNNCMGEEGILRLMESVEQPGCVLEQLVLYDIYWSEEMDRRLRALEERKPSLRVIF

SEQ ID NO: 539 - DNA, 1404 bp, synthetic construct
  misc_feature 1..1404: note = Variant of RNase inhibitor
  source 1..1404: mol_type = other DNA
atgcaccatcatcatcatcatggcggtagcggcacgatgtctcgcgatattcagtgtcaacaattgtcagatgcgcgttggacggaactgttaccgcttctgcaacaggcggaagtggtgcgcctggatgactgcggcctcactgagatgcgctgcaaagacatcagtagtgcactgcaagccaacccatcgttgatcgaattaagcctgtgtacaaatgagctgggtgatgctggagttcacttagtcgtccagggcttgcagtctggcaagtgcaagattgaaaaactgtccctccagaactgttgtctgacgaagactggttgcggtgtattaggcgacatgcttcgttcaatgcccaccctgcgcgaactgtatctgaatgataacccgttgggcgatgcgggcctccagctgctttgctccgggctggtggacccgcaatgtcacctggagaaactgcaggtggaatactgcaatctcacagcagcctcgtgcgaaagcttggcgagcgctctgcgtgccaaacgccattttaaagaattagcggtttcgaacaacgaactgggtgaagcaggcgtgcgcgtactttgtcgtgggctggtggagagtgcatgccaactggaggttctgaaactggaaaattgtggattgacctctgcctcctgcgaggatctttgtcgtgtggtcgctagcaaaccaagcctccaggaattggaccttggcatgaacaaattaggtgaccaaggcatcgcaacgttatgcccgaccctgcttcacccttcatgccagattcgtgttttgtggctctggaactgtgatatcaccaccgccggctgccgcgacctctgtcaggtattacgcgcgaagccgtccctcaaagagctgagtcttgcgggtaatgccttgggagatgaaggcgcacgtctcttgtgcgaatcgttattaagtccggcctgccagctcgaaagcctttgggtgaaaagctgttctttcactgctgcttcatgccagcattttagttcgatgttgacgcgcaacaagtgtcttgttgagctccaattgagcaataataaattaggtgattgtggcgtgcagcagctttgccaagggttatctcaaccaggtgcggccctccaggttttgtggttgggcgactgtgatgtaggtcatagtggctgtgcaagcttagcttccgtgttgcttgtcaaccgttccttacgcgaactcgaccttagtaacaactgcatgggcgaagaagggattctccgtttgatggagagcgttgaacaaccgggatgcgtgcttgaacagttggtcctctatgacatctactggtcggaggagatggatcgtcgtttacgtgccttagaagagcgcaaaccgtcattgcgcgtgattttc

SEQ ID NO: 540 - protein, 468 aa, synthetic construct
  REGION 1..468: note = Variant of RNase inhibitor
MHHHHHHGGSGTMSRDIQCQQLSDARWTELLPLLQQAEVVRLDDCGLTEMRCKDISSALQANPSLIELSLCTNELGDAGVHLVVQGLQSGKCKIEKLSLQNCCLTKTGCGVLGDMLRSMPTLRELYLNDNPLGDAGLQLLCSGLVDPQCHLEKLQVEYCNLTAASCESLASALRAKRHFKELAVSNNELGEAGVRVLCRGLVESACQLEVLKLENCGLTSASCEDLCRVVASKPSLQELDLGMNKLGDQGIATLCPTLLHPSCQIRVLWLWNCDITTAGCRDLCQVLRAKPSLKELSLAGNALGDEGARLLCESLLSPACQLESLWVKSCSFTAASCQHFSSMLTRNKCLVELQLSNNKLGDCGVQQLCQGLSQPGAALQVLWLGDCDVGHSGCASLASVLLVNRSLRELDLSNNCMGEEGILRLMESVEQPGCVLEQLVLYDIYWSEEMDRRLRALEERKPSLRVIF

SEQ ID NO: 541 - DNA, 1404 bp, synthetic construct
  misc_feature 1..1404: note = Variant of RNase inhibitor
  source 1..1404: mol_type = other DNA
atgcaccatcatcatcatcatggcggtagcggcacgatgtctcgcgatattcagtgtcaacaattgtcagatgcgcgttggacggaactgttaccgcttctgcaacagagcgaagtggtgcgcctggatgactgcggcctcactgagatgcgctgcaaagacatcagtagtgcactgcaagccaacccatcgttgaccgaattaagcctgtgtacaaatgagctgggtgatgctggagttcacttagtcatccagggcttgcagtctggcaagtgcaagattgaaaaactgtccctccagaactgttgtctgacgaagactggttgcggtgtattaggcgacatgcttcgttcaatgcccaccctgcgcgaactgtatctgaatgataacccgttgggcgatgcgggcctccagctgctttgctccgggctggtggacccgcaatgtcacctggagaaactgcaggtggaatactgcaatctcacagcagcctcgtgcgaaagcttggcgagcgctctgcgtgccaaacgccattttaaagaattagcggtttcgaacaacgaactgggtgaagcaggcgtgcgcgtactttgtcgtgggctggtggagagtgcatgccaactggaggttctgaaactggaaaattgtggattgacctctgcctcctgcgaggatctttgtcgtgtggtcgctagcaaaccaagcctccaggaattggaccttggcatgaacaaattaggtgaccaaggcatcgcaacgttatgcccgaccctgcttcacccttcatgccagattcgtgttttgtggctctggaactgtgatatcaccaccgccggctgccgcgacctctgtcaggtattacgcgcgaagccgtccctcaaagagctgagtcttgcgggtaatgccttgggagatgaaggcgcacgtctcttgtgcgaatcgttattagaaccggcgtgccagctcgaaagcctttgggtgaaaagctgttctttcactgctgcttcatgccagcattttagttcgatgttgacgcgcaacaagtgtcttgttgagctccaattgagcaataataaattaggtgattgtggcgtgcagcagctttgccaagggttatctcaaccaggtgcggccctccaggttttgtggttgggcgactgtgatgtaggtcatagtggctgtgcaagcttagcttccgtgttgcttgtcaaccgttccttacgcgaactcgaccttagtaacaactgcatgggcgaagaagggattctccgtttgatggagagcgttgaacaaccgggatgcgtgcttgaacagttggtcctctatgacatctactggtcggaggagatggatcgtcgtttacgtgccttagaagagcgcaaaccgtcattgcgcgtgattttc

SEQ ID NO: 542 - protein, 468 aa, synthetic construct
  REGION 1..468: note = Variant of RNase inhibitor
MHHHHHHGGSGTMSRDIQCQQLSDARWTELLPLLQQSEVVRLDDCGLTEMRCKDISSALQANPSLTELSLCTNELGDAGVHLVIQGLQSGKCKIEKLSLQNCCLTKTGCGVLGDMLRSMPTLRELYLNDNPLGDAGLQLLCSGLVDPQCHLEKLQVEYCNLTAASCESLASALRAKRHFKELAVSNNELGEAGVRVLCRGLVESACQLEVLKLENCGLTSASCEDLCRVVASKPSLQELDLGMNKLGDQGIATLCPTLLHPSCQIRVLWLWNCDITTAGCRDLCQVLRAKPSLKELSLAGNALGDEGARLLCESLLEPACQLESLWVKSCSFTAASCQHFSSMLTRNKCLVELQLSNNKLGDCGVQQLCQGLSQPGAALQVLWLGDCDVGHSGCASLASVLLVNRSLRELDLSNNCMGEEGILRLMESVEQPGCVLEQLVLYDIYWSEEMDRRLRALEERKPSLRVIF

SEQ ID NO: 543 - DNA, 1404 bp, synthetic construct
  misc_feature 1..1404: note = Variant of RNase inhibitor
  source 1..1404: mol_type = other DNA
atgcaccatcatcatcatcatggcggtagcggcacgatgtctctggatattcagtgtcaacaattgtcagatgcgcgttggacggaactgttaccgcttctgcaacaggcggaagtggtgcgcctggatgactgcggcctcactgagatgcgctgcaaagacatcagtagtgcactgcaagccaacccatcgttgaccgaattaagcctgtgtacaaatgagctgggtgatgctggagttcatttagtcctgcagggcttgcagtctggcaagtgcaagattgaaaaactgtccctccagaactgttgtctgacgaagactggttgcggtgtattaggcgacatgcttcgttcaatgcccaccctgcgcgaactgtatctgaatgataacccgttgggcgatgcgggcctccagctgctttgctcggggctggtggacgaacaatgtcacctggagaaactgcaggtggaatactgcaatctcacagcagcctcgtgcgaaagcttggcgagcgctctgcgtgccaaacgccattttaaagaattagcggtttcgaacaacgaactgggtgaagcaggcgtgcgcgtactttgtcgtgggctggtggatagtgcgtgccaactggaggttctgaaactggaaaattgtggattgacctctgcctcctgcgaggatctttgtcgtgtggtcgctagcaaaccaagcctccaggaattggaccttggcatgaacaaattaggtgaccaaggcatcgcaacgttatgcccgaccctgcttcacccttcatgccagattcgtgttttgtggctctggaactgtgatatcaccaccgccggctgccgcgacctctgtcgtgtattacgcgcgaagccgtccctcaaagagctgagtcttgcgggtaatgccttgggagatgaaggcgcacgtctcttgtgcgaatcgttattagaaccggcgtgccagctcgaaagcctttgggtgaaaagctgttctttcactgctgcttcatgccagcattttagttcgatgttgacgcgcaacaagtgtcttgttgagctccaattgagcaataataaattaggtgattgtggcgtgcagcagctttgccaagggttatctcaaccaggtgcggccctccaggttttgtggttgggcgactgtgatgtaggtcatagtggctgtgcaagcttagcttccgtgttgcttgtcaaccgttccttacgcgaactcgaccttagtaacaactgcatgggcgaagaagggattctccgtttgatggagagcgttgaacaaccgggatgcgtgcttgaacagttggtcctctatgacatctactggtcggaggagatggatcgtcgtttacgtgccttagaagagcgcaaaccgtcattgcgcgtgattttc

SEQ ID NO: 544 - protein, 468 aa, synthetic construct
  REGION 1..468: note = Variant of RNase inhibitor
MHHHHHHGGSGTMSLDIQCQQLSDARWTELLPLLQQAEVVRLDDCGLTEMRCKDISSALQANPSLTELSLCTNELGDAGVHLVLQGLQSGKCKIEKLSLQNCCLTKTGCGVLGDMLRSMPTLRELYLNDNPLGDAGLQLLCSGLVDEQCHLEKLQVEYCNLTAASCESLASALRAKRHFKELAVSNNELGEAGVRVLCRGLVDSACQLEVLKLENCGLTSASCEDLCRVVASKPSLQELDLGMNKLGDQGIATLCPTLLHPSCQIRVLWLWNCDITTAGCRDLCRVLRAKPSLKELSLAGNALGDEGARLLCESLLEPACQLESLWVKSCSFTAASCQHFSSMLTRNKCLVELQLSNNKLGDCGVQQLCQGLSQPGAALQVLWLGDCDVGHSGCASLASVLLVNRSLRELDLSNNCMGEEGILRLMESVEQPGCVLEQLVLYDIYWSEEMDRRLRALEERKPSLRVIF

SEQ ID NO: 545 - DNA, 1404 bp, synthetic construct
  misc_feature 1..1404: note = Variant of RNase inhibitor
  source 1..1404: mol_type = other DNA
atgcaccatcatcatcatcatggcggtagcggcacgatgtctctggatattcagtgtcaacaattgtcagatgcgcgttggactgaactgttaccgcttctgcaacagtcggaagtggtgcgcctggatgactgcggcctcactgagatgcgctgcaaagacatcagtagtgcactgcaagccaacccatcgttgaccgaattaagcctgtgtacaaatgagctgggtgatgctggagttcatttagtcctgcagggcttgcagtctggcaagtgcaagattgaaaaactgtccctccagaactgttgtctgacgaagactggttgcggtgtattaggcgacatgcttcgttcaatgcccaccctgcgcgaactgtatctgaatgataacccgttgggcgatgcgggcctccagctgctttgctccgggctggtggacccgcaatgtcacctggagaaactgcaggtggaatactgcaatctcacagcagcctcgtgcgaaagcttggcgagcgctctgcgtgccaaacgccattttaaagaattagcggtttcgaacaacgaactgggtgaagcaggcgtgcgcgtactttgtcgtgggctggtggatagtccatgccaactggaggttctgaaactggaaaattgtggattgacctctgcctcctgcgaggatctttgtcgtgtggtcgctagcaaaccaagcctccaggaattggaccttggcatgaacaaattaggtgaccaaggcatcgcaacgttatgcccgaccctgcttcacccttcatgccagattcgtgttttgtggctctggaactgtgatatcaccaccgccggctgccgcgacctctgtcgtgtattacgcgcgaagccgtccctcaaagagctgagtcttgcgggtaatgccttgggagatgaaggcgcacgtctcttgtgcgaatcgttattaagtccgggctgccagctcgaaagcctttgggtgaaaagctgttctttcactgctgcttcatgccagcattttagttcgatgttgacgcgcaacaagtgtcttgttgagctccaattgagcaataataaattaggtgattgtggcgtgcagcagctttgccaagggttatctcaaccaggtgcggccctccaggttttgtggttgggcgactgtgatgtaggtcatagtggctgtgcaagcttagcttccgtgttgcttgtcaaccgttccttacgcgaactcgaccttagtaacaactgcatgggcgaagaagggattctccgtttgatggagagcgttgaacaaccgggatgcgtgcttgaacagttggtcctctatgacatctactggtcggaggagatggatcgtcgtttacgtgccttagaagagcgcaaaccgtcattgcgcgtgattttc

SEQ ID NO: 546 - protein, 468 aa, synthetic construct
  REGION 1..468: note = Variant of RNase inhibitor
MHHHHHHGGSGTMSLDIQCQQLSDARWTELLPLLQQSEVVRLDDCGLTEMRCKDISSALQANPSLTELSLCTNELGDAGVHLVLQGLQSGKCKIEKLSLQNCCLTKTGCGVLGDMLRSMPTLRELYLNDNPLGDAGLQLLCSGLVDPQCHLEKLQVEYCNLTAASCESLASALRAKRHFKELAVSNNELGEAGVRVLCRGLVDSPCQLEVLKLENCGLTSASCEDLCRVVASKPSLQELDLGMNKLGDQGIATLCPTLLHPSCQIRVLWLWNCDITTAGCRDLCRVLRAKPSLKELSLAGNALGDEGARLLCESLLSPGCQLESLWVKSCSFTAASCQHFSSMLTRNKCLVELQLSNNKLGDCGVQQLCQGLSQPGAALQVLWLGDCDVGHSGCASLASVLLVNRSLRELDLSNNCMGEEGILRLMESVEQPGCVLEQLVLYDIYWSEEMDRRLRALEERKPSLRVIF

SEQ ID NO: 547 - DNA, 1404 bp, synthetic construct
  misc_feature 1..1404: note = Variant of RNase inhibitor
  source 1..1404: mol_type = other DNA
atgcaccatcatcatcatcatggcggtagcggcacgatgtctctggatattcagtgtcaacaattgtcagatgcgcgttggacggaactgttaccgcttctgcaacagagcgaagtggtgcgcctggatgactgcggcctcactgagagtcgctgcaaagacatcagtagtgcactgcaagccaacccatcgttgaccgaattaagcctgtgtacaaatgagctgggtgatgctggagttcatttagtcctgcagggcttgcagtctcctacctgcaagattgaaaaactgtccctccagaactgttgtctgacgaagactggttgcggtgtattaggcgacatgcttcgttcaatgcccaccctgcgcgaactgtatctgaatgataacccgttgggcgatgcgggcctccagctgctttgctccgggctggtggacccaaattgtcacctggagaaactgcaggtggaatactgcaatctcacagcagcctcgtgcgaaagcttggcgagcgctctgcgtgccaaacgccattttaaagaattagcggtttcgaacaacgaactgggtgaagcaggcgtgcgcgtactttgtcgtgggctggtggagagtgcatgccaactggaggttctgaaactggaaaattgtggattgacctctgcctcctgcgaggatctttgtcgtgtggtcgctagcaaaccaagcctccaggaattggaccttggcatgaacaaattaggtgaccaaggcatcgcaacgttatgcccgaccctgcttcacccttcatgccagattcgtgttttgtggctctggaactgtgatatcaccaccgccggctgccgcgacctctgtcgtgtattacgcgcgaagccgtccctcaaagagctgagtcttgcgggtaatgccttgggagatgaaggcgcacgtctcttgtgcgaatcgttattaagtccggcctgccagctcgaaagcctttgggtgaaaagctgttctttcactgctgcttcatgccagcattttagttcgatgttgacgcgcaacaagtgtcttgttgagctccaattgagcaataataaattaggtgattgtggcgtgcagcagctttgccaagggttatctcaaccaggtgcggccctccaggttttgtggttgggcgactgtgatgtaggtcatagtggctgtgcaagcttagcttccgtgttgcttgtcaaccgttccttacgcgaactcgaccttagtaacaactgcatgggcgaagaagggattctccgtttgatggagagcgttgaacaaccgggatgcgtgcttgaacagttggtcctctatgacatctactggtcggaggagatggatcgtcgtttacgtgccttagaagagcgcaaaccgtcattgcgcgtgattttc

SEQ ID NO: 548 - protein, 468 aa, synthetic construct
  REGION 1..468: note = Variant of RNase inhibitor
MHHHHHHGGSGTMSLDIQCQQLSDARWTELLPLLQQSEVVRLDDCGLTESRCKDISSALQANPSLTELSLCTNELGDAGVHLVLQGLQSPTCKIEKLSLQNCCLTKTGCGVLGDMLRSMPTLRELYLNDNPLGDAGLQLLCSGLVDPNCHLEKLQVEYCNLTAASCESLASALRAKRHFKELAVSNNELGEAGVRVLCRGLVESACQLEVLKLENCGLTSASCEDLCRVVASKPSLQELDLGMNKLGDQGIATLCPTLLHPSCQIRVLWLWNCDITTAGCRDLCRVLRAKPSLKELSLAGNALGDEGARLLCESLLSPACQLESLWVKSCSFTAASCQHFSSMLTRNKCLVELQLSNNKLGDCGVQQLCQGLSQPGAALQVLWLGDCDVGHSGCASLASVLLVNRSLRELDLSNNCMGEEGILRLMESVEQPGCVLEQLVLYDIYWSEEMDRRLRALEERKPSLRVIF

SEQ ID NO: 549 - DNA, 1404 bp, synthetic construct
  misc_feature 1..1404: note = Variant of RNase inhibitor
  source 1..1404: mol_type = other DNA
atgcaccatcatcatcatcatggcggtagcggcacgatgtctcgcgatattcagtgtcaacaattgtcagatgcgcgttggcacgaactgttaccgcttctgcaacagagcgaagtggtgcgcctggatgactgcggcctcactgagagtcgctgcaaagacatcagtagtgcactgcaagccaacccatcgttgatcgaattaagcctgtgtacaaatgagctgggtgatgctggagttaccttagtcatccagggcttgcagtctggcacgtgcaagattgaaaaactgtccctccagaactgttgtctgacgaagactggttgcggtgtattaggcgacatgcttcgttcaatgcccaccctgcgcgaactgtatctgaatgataacccgttgggcgatgcgggcctccagctgctttgctcggggctggtggacccgcaatgtcacctggagaaactgcaggtggaatactgcaatctcacagcagcctcgtgcgaaagcttggcgagcgctctgcgtgccaaacgccattttaaagaattagcggtttcgaacaacgaactgggtgaagcaggcgtgcgcgtactttgtcgtgggctggtggatagtgcgtgccaactggaggttctgaaactggaaaattgtggattgacctctgcctcctgcgaggatctttgtcgtgtggtcgctagcaaaccaagcctccaggaattggaccttggcatgaacaaattaggtgaccaaggcatcgcaacgttatgcccgaccctgcttcacccttcatgccagattcgtgttttgtggctctggaactgtgatatcaccaccgccggctgccgcgacctctgtcaggtattacgcgcgaagccgtccctcaaagagctgagtcttgcgggtaatgccttgggagatgaaggcgcacgtctcttgtgcgaatcgttattaagtccggcctgccagctcgaaagcctttgggtgaaaagctgttctttcactgctgcttcatgccagcattttagttcgatgttgacgcgcaacaagtgtcttgttgagctccaattgagcaataataaattaggtgattgtggcgtgcagcagctttgccaagggttatctcaaccaggtgcggccctccaggttttgtggttgggcgactgtgatgtaggtcatagtggctgtgcaagcttagcttccgtgttgcttgtcaaccgttccttacgcgaactcgaccttagtaacaactgcatgggcgaagaagggattctccgtttgatggagagcgttgaacaaccgggatgcgtgcttgaacagttggtcctctatgacatctactggtcggaggagatggatcgtcgtttacgtgccttagaagagcgcaaaccgtcattgcgcgtgattttc

SEQ ID NO: 550 - protein, 468 aa, synthetic construct
  REGION 1..468: note = Variant of RNase inhibitor
MHHHHHHGGSGTMSRDIQCQQLSDARWHELLPLLQQSEVVRLDDCGLTESRCKDISSALQANPSLIELSLCTNELGDAGVTLVIQGLQSGTCKIEKLSLQNCCLTKTGCGVLGDMLRSMPTLRELYLNDNPLGDAGLQLLCSGLVDPQCHLEKLQVEYCNLTAASCESLASALRAKRHFKELAVSNNELGEAGVRVLCRGLVDSACQLEVLKLENCGLTSASCEDLCRVVASKPSLQELDLGMNKLGDQGIATLCPTLLHPSCQIRVLWLWNCDITTAGCRDLCQVLRAKPSLKELSLAGNALGDEGARLLCESLLSPACQLESLWVKSCSFTAASCQHFSSMLTRNKCLVELQLSNNKLGDCGVQQLCQGLSQPGAALQVLWLGDCDVGHSGCASLASVLLVNRSLRELDLSNNCMGEEGILRLMESVEQPGCVLEQLVLYDIYWSEEMDRRLRALEERKPSLRVIF

SEQ ID NO: 551 - DNA, 1404 bp, synthetic construct
  misc_feature 1..1404: note = Variant of RNase inhibitor
  source 1..1404: mol_type = other DNA
atgcaccatcatcatcatcatggcggtagcggcacgatgtctcgcgatattcagtgtcaacaattgtcagatgcgcgttggacggaactgttaccgcttctgcaacagagcgaagtggtgcgcctggatgactgcggcctcactgagatgcgctgcaaagacatcagtagtgcactgcaagccaacccatcgttgaccgaattaagcctgtgtacaaatgagctgggtgatgctggagttaccttagtcctgcagggcttgcagtctcctacctgcaagattgaaaaactgtccctccagaactgttgtctgacgaagactggttgcggtgtattaggcgacatgcttcgttcaatgcccaccctgcgcgaactgtatctgaatgataacccgttgggcgatgcgggcctccagctgctttgctccgggctggtggacgaacaatgtcacctggagaaactgcaggtggaatactgcaatctcacagcagcctcgtgcgaaagcttggcgagcgctctgcgtgccaaacgccattttaaagaattagcggtttcgaacaacgaactgggtgaagcaggcgtgcgcgtactttgtcgtgggctggtggatagtgcgtgccaactggaggttctgaaactggaaaattgtggattgacctctgcctcctgcgaggatctttgtcgtgtggtcgctagcaaaccaagcctccaggaattggaccttggcatgaacaaattaggtgaccaaggcatcgcaacgttatgcccgaccctgcttcacccttcatgccagattcgtgttttgtggctctggaactgtgatatcaccaccgccggctgccgcgacctctgtcgtgtattacgcgcgaagccgtccctcaaagagctgagtcttgcgggtaatgccttgggagatgaaggcgcacgtctcttgtgcgaatcgttattagaaccggcgtgccagctcgaaagcctttgggtgaaaagctgttctttcactgctgcttcatgccagcattttagttcgatgttgacgcgcaacaagtgtcttgttgagctccaattgagcaataataaattaggtgattgtggcgtgcagcagctttgccaagggttatctcaaccaggtgcggccctccaggttttgtggttgggcgactgtgatgtaggtcatagtggctgtgcaagcttagcttccgtgttgcttgtcaaccgttccttacgcgaactcgaccttagtaacaactgcatgggcgaagaagggattctccgtttgatggagagcgttgaacaaccgggatgcgtgcttgaacagttggtcctctatgacatctactggtcggaggagatggatcgtcgtttacgtgccttagaagagcgcaaaccgtcattgcgcgtgattttc

SEQ ID NO: 552 - protein, 468 aa, synthetic construct
  REGION 1..468: note = Variant of RNase inhibitor
MHHHHHHGGSGTMSRDIQCQQLSDARWTELLPLLQQSEVVRLDDCGLTEMRCKDISSALQANPSLTELSLCTNELGDAGVTLVLQGLQSPTCKIEKLSLQNCCLTKTGCGVLGDMLRSMPTLRELYLNDNPLGDAGLQLLCSGLVDEQCHLEKLQVEYCNLTAASCESLASALRAKRHFKELAVSNNELGEAGVRVLCRGLVDSACQLEVLKLENCGLTSASCEDLCRVVASKPSLQELDLGMNKLGDQGIATLCPTLLHPSCQIRVLWLWNCDITTAGCRDLCRVLRAKPSLKELSLAGNALGDEGARLLCESLLEPACQLESLWVKSCSFTAASCQHFSSMLTRNKCLVELQLSNNKLGDCGVQQLCQGLSQPGAALQVLWLGDCDVGHSGCASLASVLLVNRSLRELDLSNNCMGEEGILRLMESVEQPGCVLEQLVLYDIYWSEEMDRRLRALEERKPSLRVIF

SEQ ID NO: 553 - DNA, 1404 bp, synthetic construct
  misc_feature 1..1404: note = Variant of RNase inhibitor
  source 1..1404: mol_type = other DNA
atgcaccatcatcatcatcatggcggtagcggcacgatgtctcgcgatattcagtgtcaacaattgtcagatgcgcgttggacggaactgttaccgcttctgcaacagagcgaagtggtgcgcctggatgactgcggcctcactgagatgcgctgcaaagacatcagtagtgcactgcaagccaacccatcgttgaccgaattaagcctgtgtacaaatgagctgggtgatgctggagttcatttagtcctgcagggcttgcagtctcctacctgcaagattgaaaaactgtccctccagaactgttgtctgacgaagactggttgcggtgtattaggcgacatgcttcgttcaatgcccaccctgcgcgaactgtatctgaatgataacccgttgggcgatgcgggcctccagctgctttgctccgggctggtggacccgcaatgtcacctggagaaactgcaggtggaatactgcaatctcacagcagcctcgtgcgaaagcttggcgagcgctctgcgtgccaaacgccattttaaagaattagcggtttcgaacaacgaactgggtgaagcaggcgtgcgcgtactttgtcgtgggctggtggatagtgcgtgccaactggaggttctgaaactggaaaattgtggattgacctctgcctcctgcgaggatctttgtcgtgtggtcgctagcaaaccaagcctccaggaattggaccttggcatgaacaaattaggtgaccaaggcatcgcaacgttatgcccgaccctgcttcacccttcatgccagattcgtgttttgtggctctggaactgtgatatcaccaccgccggctgccgcgacctctgtcaggtattacgcgcgaagccgtccctcaaagagctgagtcttgcgggtaatgccttgggagatgaaggcgcacgtctcttgtgcgaatcgttattagaaccggcgtgccagctcgaaagcctttgggtgaaaagctgttctttcactgctgcttcatgccagcattttagttcgatgttgacgcgcaacaagtgtcttgttgagctccaattgagcaataataaattaggtgattgtggcgtgcagcagctttgccaagggttatctcaaccaggtgcggccctccaggttttgtggttgggcgactgtgatgtaggtcatagtggctgtgcaagcttagcttccgtgttgcttgtcaaccgttccttacgcgaactcgaccttagtaacaactgcatgggcgaagaagggattctccgtttgatggagagcgttgaacaaccgggatgcgtgcttgaacagttggtcctctatgacatctactggtcggaggagatggatcgtcgtttacgtgccttagaagagcgcaaaccgtcattgcgcgtgattttc

SEQ ID NO: 554 - protein, 468 aa, synthetic construct
  REGION 1..468: note = Variant of RNase inhibitor
MHHHHHHGGSGTMSRDIQCQQLSDARWTELLPLLQQSEVVRLDDCGLTEMRCKDISSALQANPSLTELSLCTNELGDAGVHLVLQGLQSPTCKIEKLSLQNCCLTKTGCGVLGDMLRSMPTLRELYLNDNPLGDAGLQLLCSGLVDPQCHLEKLQVEYCNLTAASCESLASALRAKRHFKELAVSNNELGEAGVRVLCRGLVDSACQLEVLKLENCGLTSASCEDLCRVVASKPSLQELDLGMNKLGDQGIATLCPTLLHPSCQIRVLWLWNCDITTAGCRDLCQVLRAKPSLKELSLAGNALGDEGARLLCESLLEPACQLESLWVKSCSFTAASCQHFSSMLTRNKCLVELQLSNNKLGDCGVQQLCQGLSQPGAALQVLWLGDCDVGHSGCASLASVLLVNRSLRELDLSNNCMGEEGILRLMESVEQPGCVLEQLVLYDIYWSEEMDRRLRALEERKPSLRVIF

SEQ ID NO: 555 - DNA, 1404 bp, synthetic construct
  misc_feature 1..1404: note = Variant of RNase inhibitor
  source 1..1404: mol_type = other DNA
atgcaccatcatcatcatcatggcggtagcggcacgatgtctctggatattcagtgtcaacaattgtcagatgcgcgttggactgaactgttaccgcttctgcaacaggcggaagtggtgcgcctggatgactgcggcctcactgagagtcgctgcaaagacatcagtagtgcactgaaagccaacccaagtttgaccgaattaagcctgtgtacaaatgagctgggtgatgctggagttaccttagtcctgcagggcttgcagtctggcacgtgcaagattgaaaaactgtccctccagaactgttgtctgacgaagaccggttgcggtgtattaggcgacatgcttcgttcaatgcccaccctgcgcgcactgtatctgaatgataacccgttgggcgatgcgggcctccagctgctttgccaggggctggtggacgaaaattgtcacctggagaaactgcaggtggaatactgcaatctcacagcagcctcgtgcgaaagcttggcgagcgctctgcgtgcctcgcgccattttaaagaattagcggtttcgaacaacgaactgggtgaagcaggcgtgcgcgtactttgtcgtgggctggtggagagtccatgccaactggaggttctgaaactggaaaattgtggattgacctctgcctcctgcgaggatctttgtctggtggtcgctagcaaaccaagcctccaggaattggaccttggcatgaacaaattaggtgaccaaggcatcgcaacgttatgcccgaccctgcttcacccttcatgccagattcgtgttttgtggctctggaactgtgatatcaccaccgccggctgccgcgacctctgtcaggtattacgcgcgaagtcgtccctcaaagagctgagtcttgcgggtaatgccttgggagatgaaggcgcacgtctcttgtgcgaatcgttattaagtccggcctgccagctcgaaagcctttgggtgaaaagctgttctttcactgctgcttcatgccagcattttagttcgatgttgacgcgcaacaagtgtcttgttgagctccaattgagcaataataaattaggtgattgtggcgtgcagcagctttgccaagggttatctcaaccaggtgcggccctccaggttttgtggttgggcgactgtgatgtaggtcatagtggctgtgctagcttagcttccgtgttgcttgtcaaccgttccttacgcgaactcgaccttagtaacaactgcatgggcgaagaagggattctccgtttgatggagagcgttgaacaaccgggatgcgtgcttgaacagttggtcctctatgacatctactggtcggaggagatggatcgtcgtttacgtgccttagaagagcgcaaaccgtcattgcgcgtgattttc

SEQ ID NO: 556 - protein, 468 aa, synthetic construct
  REGION 1..468: note = Variant of RNase inhibitor
MHHHHHHGGSGTMSLDIQCQQLSDARWTELLPLLQQAEVVRLDDCGLTESRCKDISSALKANPSLTELSLCTNELGDAGVTLVLQGLQSGTCKIEKLSLQNCCLTKTGCGVLGDMLRSMPTLRALYLNDNPLGDAGLQLLCQGLVDENCHLEKLQVEYCNLTAASCESLASALRASRHFKELAVSNNELGEAGVRVLCRGLVESPCQLEVLKLENCGLTSASCEDLCLVVASKPSLQELDLGMNKLGDQGIATLCPTLLHPSCQIRVLWLWNCDITTAGCRDLCQVLRAKSSLKELSLAGNALGDEGARLLCESLLSPACQLESLWVKSCSFTAASCQHFSSMLTRNKCLVELQLSNNKLGDCGVQQLCQGLSQPGAALQVLWLGDCDVGHSGCASLASVLLVNRSLRELDLSNNCMGEEGILRLMESVEQPGCVLEQLVLYDIYWSEEMDRRLRALEERKPSLRVIF

SEQ ID NO: 557 - DNA, 1404 bp, synthetic construct
  misc_feature 1..1404: note = Variant of RNase inhibitor
  source 1..1404: mol_type = other DNA
atgcaccatcatcatcatcatggcggtagcggcacgatgtctctggatattcagtgtcaacaattgtcagatgcgcgttggactgaactgttaccgcttctgcaacagtcggaagtggtgcgcctggatgactgcggcctcactgagagtcgctgcaaagacatcagtagtgcactgaaagccaacccacgtttgaccgaattaagcctgtgtacaaatgagctgggtgatgctggagttaccttagtcctgcagggcttgcagtctggcacgtgcaagattgaaaaactgtccctccagaactgttgtctgacgaagactggttgcggtgtattaggcgacatgcttcgttcaatgcccaccctgcgcgcactgtatctgaatgataacccgttgggcgatgcgggcctccagctgctttgctccgggctggtggacgaaaattgtcacctggagaaactgcaggtggaatactgcaatctcacagcagcctcgtgcgaaagcttggcgagcgctctgcgtgccaagcgccattttaaagaattagcggtttcgaacaacgaactgggtgaagcaggcgtgcgcgtactttgtcgtgggctggtggagagtccatgccaactggaggttctgaaactggaaaattgtggattgacctctgcctcctgcgaggatctttgtcgtgtggtcgctagcaaaccaagcctccaggaattggaccttggcatgaacaaattaggtgaccaaggcatcgcaacgttatgcccgaccctgcttcacccttcatgccagattcgtgttttgtggctctggaactgtgatatcaccaccgccggctgccgcgacctctgtcaggtattacgcgcgaagccgtccctcaaagagctgagtcttgcgggtaatgccttgggagatgaaggcgcacgtctcttgtgcgaatcgttattaagtccgggctgccagctcgaaagcctttgggtgaaaagctgttctttcactgctgcttcatgccagcattttagtgcgatgttgacgcgcaacaagtgtcttgttgagctccaattgagcaataataaattaggtgattgtggcgtgcagcagctttgccaagggttatctcaaccaggtgcggccctccaggttttgtggttgggcgactgtgatgtaggtcatagtggctgtgcaagcttagcttccgtgttgcttgtcaaccgttccttacgcgaactcgaccttagtaacaactgcatgggcgaagaagggattctccgtttgatggagagcgttgaacaaccgggatgcgtgcttgaacagttggtcctctatgacatctactggtcggaggagatggatcgtcgtttacgtgccttagaagagcgcaaaccgtcattgcgcgtgattttc

SEQ ID NO: 558 - protein, 468 aa, synthetic construct
  REGION 1..468: note = Variant of RNase inhibitor
MHHHHHHGGSGTMSLDIQCQQLSDARWTELLPLLQQSEVVRLDDCGLTESRCKDISSALKANPRLTELSLCTNELGDAGVTLVLQGLQSGTCKIEKLSLQNCCLTKTGCGVLGDMLRSMPTLRALYLNDNPLGDAGLQLLCSGLVDENCHLEKLQVEYCNLTAASCESLASALRAKRHFKELAVSNNELGEAGVRVLCRGLVESPCQLEVLKLENCGLTSASCEDLCRVVASKPSLQELDLGMNKLGDQGIATLCPTLLHPSCQIRVLWLWNCDITTAGCRDLCQVLRAKPSLKELSLAGNALGDEGARLLCESLLSPGCQLESLWVKSCSFTAASCQHFSAMLTRNKCLVELQLSNNKLGDCGVQQLCQGLSQPGAALQVLWLGDCDVGHSGCASLASVLLVNRSLRELDLSNNCMGEEGILRLMESVEQPGCVLEQLVLYDIYWSEEMDRRLRALEERKPSLRVIF

SEQ ID NO: 559 - DNA, 1404 bp, synthetic construct
  misc_feature 1..1404: note = Variant of RNase inhibitor
  source 1..1404: mol_type = other DNA
atgcaccatcatcatcatcatggcggtagcggcacgatgtctctggatattcagtgtcaacaattgtcagatgcgcgttggactgaactgttaccgcttctgcaacagtcggaagtggtgcgcctggatgactgcggcctcactgagagtcgctgcaaagacatcagtagtgcactgcaagccaacccatcgttgatcgaattaagcctgtgtacaaatgagctgggtgatgctggagttaccttagtcctgcagggcttgcagtctggcacgtgcaagattgaaaaactgtccctccagaactgttgtctgacgaagactggttgcggtgtattaggcgacatgcttcgttcaatgcccaccctgcgcgcactgtatctgaatgataacccgttgggcgatgcgggcctccagctgctttgctccgggctggtggacgaaaattgtcacctggagaaactgcaggtggaatactgcaatctcacagcagcctcgtgcgaaagcttggcgagcgctctgcgtgccaagcgccattttaaagaattagcggtttcgaacaacgaactgggtgaagcaggcgtgcgcgtactttgtcgtgggctggtggagagtccatgccaactggaggttctgaaactggaaaattgtggattgacctctgcctcctgcgaggatctttgtctggtggtcgctagcaaaccaagcctccaggaattggaccttggcatgaacaaattaggtgaccaaggcatcgcaacgttatgcccgaccctgcttcacccttcatgccagattcgtgttttgtggctctggaactgtgatatcaccaccgccggctgccgcgacctctgtcaggtattacgcgcgaagccgtccctcaaagagctgagtcttgcgggtaatgccttgggagatgaaggcgcacgtctcttgtgcgaatcgttattagaaccgggctgccagctcgaaagcctttgggtgaaaagctgttctttcactgctgcttcatgccagcattttagtatgatgttgacgcgcaacaagtgtcttgttgagctccaattgagcaataataaattaggtgattgtggcgtgcagcagctttgccaagggttatctcaaccaggtgcggccctccaggttttgtggttgggcgactgtgatgtaggtcatagtggctgtctgagcttagcttccgtgttgcttgtcaaccgttccttacgcgaactcgaccttagtaacaactgcatgggcgaagaagggattctccgtttgatggagagcgttgaacaaccgggatgcgtgcttgaacagttggtcctctatgacatctactggtcggaggagatggatcgtcgtttacgtgccttagaagagcgcaaaccgtcattgcgcgtgattttc

SEQ ID NO: 560 - protein, 468 aa, synthetic construct
  REGION 1..468: note = Variant of RNase inhibitor
MHHHHHHGGSGTMSLDIQCQQLSDARWTELLPLLQQSEVVRLDDCGLTESRCKDISSALQANPSLIELSLCTNELGDAGVTLVLQGLQSGTCKIEKLSLQNCCLTKTGCGVLGDMLRSMPTLRALYLNDNPLGDAGLQLLCSGLVDENCHLEKLQVEYCNLTAASCESLASALRAKRHFKELAVSNNELGEAGVRVLCRGLVESPCQLEVLKLENCGLTSASCEDLCLVVASKPSLQELDLGMNKLGDQGIATLCPTLLHPSCQIRVLWLWNCDITTAGCRDLCQVLRAKPSLKELSLAGNALGDEGARLLCESLLEPGCQLESLWVKSCSFTAASCQHFSMMLTRNKCLVELQLSNNKLGDCGVQQLCQGLSQPGAALQVLWLGDCDVGHSGCLSLASVLLVNRSLRELDLSNNCMGEEGILRLMESVEQPGCVLEQLVLYDIYWSEEMDRRLRALEERKPSLRVIF

SEQ ID NO: 561 - DNA, 1404 bp, synthetic construct
  misc_feature 1..1404: note = Variant of RNase inhibitor
  source 1..1404: mol_type = other DNA
atgcaccatcatcatcatcatggcggtagcggcacgatgtctctggatattcagtgtcaacaattgtcagatgcgcgttggactgaactgttaccgcttctgcaacaggcggaagtggtgcgcctggatgactgcggcctcactgagagtcgctgcaaagacatcagtagtgcactgcaagccaacccatcgttgaccgaattaagcctgtgtacaaatgagctgggtgatgctggagttaccttagtcctgcagggcttgcagtctggcacgtgcaagattgaaaaactgtccctccagaactgttgtctgacgaagactggttgcggtgtattaggcgacatgcttcgttcaatgcccaccctgcgcgcactgtatctgaatgataacccgttgggcgatgcgggcctccagctgctttgccaggggctggtggacgaaaattgtcacctggagaaactgcaggtggaatactgcaatctcacagcagcctcgtgcgaaagcttggcgagcgctctgcgtgccaaacgccattttaaagaattagcggtttcgaacaacgaactgggtgaagcaggcgtgcgcgtactttgtcgtgggctggtggagagtccatgccaactggaggttctgaaactggaaaattgtggattgacctctgcctcctgcgaggatctttgtcgtgtggtcgctagcaaaccaagcctccaggaattggaccttggcatgaacaaattaggtgaccaaggcatcgcaacgttatgcccgaccctgcttcacccttcatgccagattcgtgttttgtggctctggaactgtgatatcaccaccgccggctgccgcgacctctgtcaggtattacgcgcgaagtcgtccctcaaagagctgagtcttgcgggtaatgccttgggagatgaaggcgcacgtctcttgtgcgaatcgttattaagtccggcctgccagctcgaaagcctttgggtgaaaagctgttctttcactgctgcttcatgccagcattttagttcgatgttgacgcgcaacaagtgtcttgttgagctccaattgagcaataataaattaggtgattgtggcgtgcagcagctttgccaagggttatctcaaccaggtgcggccctccaggttttgtggttgggcgactgtgatgtaggtcatagtggctgtgctagcttagcttccgtgttgcttgtcaaccgttccttacgcgaactcgaccttagtaacaactgcatgggcgaagaagggattctccgtttgatggagagcgttgaacaaccgggatgcgtgcttgaacagttggtcctctatgacatctactggtcggaggagatggatcgtcgtttacgtgccttagaagagcgcaaaccgtcattgcgcgtgattttc

SEQ ID NO: 562 - protein, 468 aa, synthetic construct
  REGION 1..468: note = Variant of RNase inhibitor
MHHHHHHGGSGTMSLDIQCQQLSDARWTELLPLLQQAEVVRLDDCGLTESRCKDISSALQANPSLTELSLCTNELGDAGVTLVLQGLQSGTCKIEKLSLQNCCLTKTGCGVLGDMLRSMPTLRALYLNDNPLGDAGLQLLCQGLVDENCHLEKLQVEYCNLTAASCESLASALRAKRHFKELAVSNNELGEAGVRVLCRGLVESPCQLEVLKLENCGLTSASCEDLCRVVASKPSLQELDLGMNKLGDQGIATLCPTLLHPSCQIRVLWLWNCDITTAGCRDLCQVLRAKSSLKELSLAGNALGDEGARLLCESLLSPACQLESLWVKSCSFTAASCQHFSSMLTRNKCLVELQLSNNKLGDCGVQQLCQGLSQPGAALQVLWLGDCDVGHSGCASLASVLLVNRSLRELDLSNNCMGEEGILRLMESVEQPGCVLEQLVLYDIYWSEEMDRRLRALEERKPSLRVIF

SEQ ID NO: 563 - DNA, 1404 bp, synthetic construct
  misc_feature 1..1404: note = Variant of RNase inhibitor
  source 1..1404: mol_type = other DNA
atgcaccatcatcatcatcatggcggtagcggcacgatgtctctggatattcagtgtcaacaattgtcagatgcgcgttggactgaactgttaccgcttctgcaacagtcggaagtggtgcgcctggatgactgcggcctcactgagagtcgctgcaaagacatcagtagtgcactgcaagccaacccacgtttgaccgaattaagcctgtgtacaaatgagctgggtgatgctggagttaccttagtcctgcagggcttgcagtctggcacgtgcaagattgaaaaactgtccctccagaactgttgtctgacgaaggatggttgcggtgtattaggcgacatgcttcgttcaatgcccaccctgcgcgcactgtatctgaatgataacccgttgggcgatgcgggcctccagctgctttgccaggggctggtggacgaaaattgtcacctggagaaactgcaggtggaatactgcaatctcacagcagcctcgtgcgaaagcttggcgagcgctctgcgtgccaagcgccattttaaagaattagcggtttcgaacaacgaactgggtgaagcaggcgtgcgcgtactttgtcgtgggctggtggagagtccatgccaactggaggttctgaaactggaaaattgtggattgacctctgcctcctgcgaggatctttgtcgtgtggtcgctagcaaaccaagcctccaggaattggaccttggcatgaacaaattaggtgaccaaggcatcgcaacgttatgcccgaccctgcttcacccttcatgccagattcgtgttttgtggctctggaactgtgatatcaccaccgccggctgccgcgacctctgtcaggtattacgcgcgaagtcgtccctcaaagagctgagtcttgcgggtaatgccttgggagatgaaggcgcacgtctcttgtgcgaatcgttattagaaccgggctgccagctcgaaagcctttgggtgaaaagctgttctttcactgctgcttcatgccagcattttagtgcgatgttgacgcgcaacaagtgtcttgttgagctccaattgagcaataataaattaggtgattgtggcgtgcagcagctttgccaagggttatctcaaccaggtgcggccctccaggttttgtggttgggcgactgtgatgtaggtcatagtggctgtctgagcttagcttccgtgttgcttgtcaaccgttccttacgcgaactcgaccttagtaacaactgcatgggcgaagaagggattctccgtttgatggagagcgttgaacaaccgggatgcgtgcttgaacagttggtcctctatgacatctactggtcggaggagatggatcgtcgtttacgtgccttagaagagcgcaaaccgtcattgcgcgtgattttc

SEQ ID NO: 564 - protein, 468 aa, synthetic construct
  REGION 1..468: note = Variant of RNase inhibitor
MHHHHHHGGSGTMSLDIQCQQLSDARWTELLPLLQQSEVVRLDDCGLTESRCKDISSALQANPRLTELSLCTNELGDAGVTLVLQGLQSGTCKIEKLSLQNCCLTKDGCGVLGDMLRSMPTLRALYLNDNPLGDAGLQLLCQGLVDENCHLEKLQVEYCNLTAASCESLASALRAKRHFKELAVSNNELGEAGVRVLCRGLVESPCQLEVLKLENCGLTSASCEDLCRVVASKPSLQELDLGMNKLGDQGIATLCPTLLHPSCQIRVLWLWNCDITTAGCRDLCQVLRAKSSLKELSLAGNALGDEGARLLCESLLEPGCQLESLWVKSCSFTAASCQHFSAMLTRNKCLVELQLSNNKLGDCGVQQLCQGLSQPGAALQVLWLGDCDVGHSGCLSLASVLLVNRSLRELDLSNNCMGEEGILRLMESVEQPGCVLEQLVLYDIYWSEEMDRRLRALEERKPSLRVIF

SEQ ID NO: 565 - DNA, 1404 bp, synthetic construct
  misc_feature 1..1404: note = Variant of RNase inhibitor
  source 1..1404: mol_type = other DNA
atgcaccatcatcatcatcatggcggtagcggcacgatgtctctggatattcagtgtcaacaattgtcagatgcgcgttggactgaactgttaccgcttctgcaacaggcggaagtggtgcgcctggatgactgcggcctcactgagagtcgctgcaaagacatcagtagtgcactgaaagccaacccatcgttgaccgaattaagcctgtgtacaaatgagctgggtgatgctggagttaccttagtcctgcagggcttgcagtctggcacgtgcaagattgaaaaactgtccctccagaactgttgtctgacgaagactggttgcggtgtattaggcgacatgcttcgttcaatgcccaccctgcgcgcactgtatctgaatgataacccgttgggcgatgcgggcctccagctgctttgcagtgggctggtggacgaaaattgtcacctggagaaactgcaggtggaatactgcaatctcacagcagcctcgtgcgaaagcttggcgagcgctctgcgtgccaaacgccattttaaagaattagcggtttcgaacaacgaactgggtgaagcaggcgtgcgcgtactttgtcgtgggctggtggagagtccatgccaactggaggttctgaaactggaaaattgtggattgacctctgcctcctgcgaggatctttgtcgtgtggtcgctagcaaaccaagcctccaggaattggaccttggcatgaacaaattaggtgaccaaggcatcgcaacgttatgcccgaccctgcttcacccttcatgccagattcgtgttttgtggctctggaactgtgatatcaccaccgccggctgccgcgacctctgtcaggtattacgcgcgaagccgtccctcaaagagctgagtcttgcgggtaatgccttgggagatgaaggcgcacgtctcttgtgcgaatcgttattaagtccgggctgccagctcgaaagcctttgggtgaaaagctgttctttcactgctgcttcatgccagcattttagtgcgatgttgacgcgcaacaagtgtcttgttgagctccaattgagcaataataaattaggtgattgtggcgtgcagcagctttgccaagggttatctcaaccaggtgcggccctccaggttttgtggttgggcgactgtgatgtaggtcatagtggctgtctgagcttagcttccgtgttgcttgtcaaccgttccttacgcgaactcgaccttagtaacaactgcatgggcgaagaagggattctccgtttgatggagagcgttgaacaaccgggatgcgtgcttgaacagttggtcctctatgacatctactggtcggaggagatggatcgtcgtttacgtgccttagaagagcgcaaaccgtcattgcgcgtgattttc

SEQ ID NO: 566 - protein, 468 aa, synthetic construct
  REGION 1..468: note = Variant of RNase inhibitor
MHHHHHHGGSGTMSLDIQCQQLSDARWTELLPLLQQAEVVRLDDCGLTESRCKDISSALKANPSLTELSLCTNELGDAGVTLVLQGLQSGTCKIEKLSLQNCCLTKTGCGVLGDMLRSMPTLRALYLNDNPLGDAGLQLLCSGLVDENCHLEKLQVEYCNLTAASCESLASALRAKRHFKELAVSNNELGEAGVRVLCRGLVESPCQLEVLKLENCGLTSASCEDLCRVVASKPSLQELDLGMNKLGDQGIATLCPTLLHPSCQIRVLWLWNCDITTAGCRDLCQVLRAKPSLKELSLAGNALGDEGARLLCESLLSPGCQLESLWVKSCSFTAASCQHFSAMLTRNKCLVELQLSNNKLGDCGVQQLCQGLSQPGAALQVLWLGDCDVGHSGCLSLASVLLVNRSLRELDLSNNCMGEEGILRLMESVEQPGCVLEQLVLYDIYWSEEMDRRLRALEERKPSLRVIF

SEQ ID NO: 567 - DNA, 1404 bp, synthetic construct
  misc_feature 1..1404: note = Variant of RNase inhibitor
  source 1..1404: mol_type = other DNA
atgcaccatcatcatcatcatggcggtagcggcacgatgtctctggatattcagtgtcaacaattgtcagatgcgcgttggactgaactgttaccgcttctgcaacaggcggaagtggtgcgcctggatgactgcggcctcactgagagtcgctgcaaagacatcagtagtgcactgaaagccaacccaagtttgaccgaattaagcctgtgtacaaatgagctgggtgatgctggagttaccttagtcctgcagggcttgcagtctggcacgtgcaagattgaaaaactgtccctccagaactgttgtctgacgaaggatggttgcggtgtattaggcgacatgcttcgttcaatgcccaccctgcgcgcactgtatctgaatgataacccgttgggcgatgcgggcctccagctgctttgccaggggctggtggacgaaaattgtcacctggagaaactgcaggtggaatactgcaatctcacagcagcctcgtgcgaaagcttggcgagcgctctgcgtgcctcgcgccattttaaagaattagcggtttcgaacaacgaactgggtgaagcaggcgtgcgcgtactttgtcgtgggctggtggagagtccatgccaactggaggttctgaaactggaaaattgtggattgacctctgcctcctgcgaggatctttgtcgtgtggtcgctagcaaaccaagcctccaggaattggaccttggcatgaacaaattaggtgaccaaggcatcgcaacgttatgcccgaccctgcttcacccttcatgccagattcgtgttttgtggctctggaactgtgatatcaccaccgccggctgccgcgacctctgtcaggtattacgcgcgaagccgtccctcaaagagctgagtcttgcgggtaatgccttgggagatgaaggcgcacgtctcttgtgcgaatcgttattaagtccgggctgccagctcgaaagcctttgggtgaaaagctgttctttcactgctgcttcatgccagcattttagtatgatgttgacgcgcaacaagtgtcttgttgagctccaattgagcaataataaattaggtgattgtggcgtgcagcagctttgccaagggttatctcaaccaggtgcggccctccaggttttgtggttgggcgactgtgatgtaggtcatagtggctgtgctagcttagcttccgtgttgcttgtcaaccgttccttacgcgaactcgaccttagtaacaactgcatgggcgaagaagggattctccgtttgatggagagcgttgaacaaccgggatgcgtgcttgaacagttggtcctctatgacatctactggtcggaggagatggatcgtcgtttacgtgccttagaagagcgcaaaccgtcattgcgcgtgattttc

SEQ ID NO: 568 - protein, 468 aa, synthetic construct
  REGION 1..468: note = Variant of RNase inhibitor
MHHHHHHGGSGTMSLDIQCQQLSDARWTELLPLLQQAEVVRLDDCGLTESRCKDISSALKANPSLTELSLCTNELGDAGVTLVLQGLQSGTCKIEKLSLQNCCLTKDGCGVLGDMLRSMPTLRALYLNDNPLGDAGLQLLCQGLVDENCHLEKLQVEYCNLTAASCESLASALRASRHFKELAVSNNELGEAGVRVLCRGLVESPCQLEVLKLENCGLTSASCEDLCRVVASKPSLQELDLGMNKLGDQGIATLCPTLLHPSCQIRVLWLWNCDITTAGCRDLCQVLRAKPSLKELSLAGNALGDEGARLLCESLLSPGCQLESLWVKSCSFTAASCQHFSMMLTRNKCLVELQLSNNKLGDCGVQQLCQGLSQPGAALQVLWLGDCDVGHSGCASLASVLLVNRSLRELDLSNNCMGEEGILRLMESVEQPGCVLEQLVLYDIYWSEEMDRRLRALEERKPSLRVIF

SEQ ID NO: 569 - DNA, 1404 bp, synthetic construct
  misc_feature 1..1404: note = Variant of RNase inhibitor
  source 1..1404: mol_type = other DNA
atgcaccatcatcatcatcatggcggtagcggcacgatgtctctggatattcagtgtcaacaattgtcagatgcgcgttggactgaactgttaccgcttctgcaacagtcggaagtggtgcgcctggatgactgcggcctcactgagagtcgctgcaaagacatcagtagtgcactgcaagccaacccatcgttgaccgaattaagcctgtgtacaaatgagctgggtgatgctggagttaccttagtcctgcagggcttgcagtctggcacgtgcaagattgaaaaactgtccctccagaactgttgtctgacgaagaccggttgcggtgtattaggcgacatgcttcgttcaatgcccaccctgcgcgcactgtatctgaatgataacccgttgggcgatgcgggcctccagctgctttgccaggggctggtggacgaaaattgtcacctggagaaactgcaggtggaatactgcaatctcacagcagcctcgtgcgaaagcttggcgagcgctctgcgtgccaaacgccattttaaagaattagcggtttcgaacaacgaactgggtgaagcaggcgtgcgcgtactttgtcgtgggctggtggagagtccatgccaactggaggttctgaaactggaaaattgtggattgacctctgcctcctgcgaggatctttgtcgtgtggtcgctagcaaaccaagcctccaggaattggaccttggcatgaacaaattaggtgaccaaggcatcgcaacgttatgcccgaccctgcttcacccttcatgccagattcgtgttttgtggctctggaactgtgatatcaccaccgccggctgccgcgacctctgtcaggtattacgcgcgaagccgtccctcaaagagctgagtcttgcgggtaatgccttgggagatgaaggcgcacgtctcttgtgcgaatcgttattaagtccgggctgccagctcgaaagcctttgggtgaaaagctgttctttcactgctgcttcatgccagcattttagtatgatgttgacgcgcaacaagtgtcttgttgagctccaattgagcaataataaattaggtgattgtggcgtgcagcagctttgccaagggttatctcaaccaggtgcggccctccaggttttgtggttgggcgactgtgatgtaggtcatagtggctgtctgagcttagcttccgtgttgcttgtcaaccgttccttacgcgaactcgaccttagtaacaactgcatgggcgaagaagggattctccgtttgatggagagcgttgaacaaccgggatgcgtgcttgaacagttggtcctctatgacatctactggtcggaggagatggatcgtcgtttacgtgccttagaagagcgcaaaccgtcattgcgcgtgattttc

SEQ ID NO: 570 - protein, 468 aa, synthetic construct
  REGION 1..468: note = Variant of RNase inhibitor
MHHHHHHGGSGTMSLDIQCQQLSDARWTELLPLLQQSEVVRLDDCGLTESRCKDISSALQANPSLTELSLCTNELGDAGVTLVLQGLQSGTCKIEKLSLQNCCLTKTGCGVLGDMLRSMPTLRALYLNDNPLGDAGLQLLCQGLVDENCHLEKLQVEYCNLTAASCESLASALRAKRHFKELAVSNNELGEAGVRVLCRGLVESPCQLEVLKLENCGLTSASCEDLCRVVASKPSLQELDLGMNKLGDQGIATLCPTLLHPSCQIRVLWLWNCDITTAGCRDLCQVLRAKPSLKELSLAGNALGDEGARLLCESLLSPGCQLESLWVKSCSFTAASCQHFSMMLTRNKCLVELQLSNNKLGDCGVQQLCQGLSQPGAALQVLWLGDCDVGHSGCLSLASVLLVNRSLRELDLSNNCMGEEGILRLMESVEQPGCVLEQLVLYDIYWSEEMDRRLRALEERKPSLRVIF

SEQ ID NO: 571 - DNA, 1404 bp, synthetic construct
  misc_feature 1..1404: note = Variant of RNase inhibitor
  source 1..1404: mol_type = other DNA
atgcaccatcatcatcatcatggcggtagcggcacgatgtctctggatattcagtgtcaacaattgtcagatgcgcgttggactgaactgttaccgcttctgcaacagtcggaagtggtgcgcctggatgactgcggcctcactgagagtcgctgcaaagacatcagtagtgcactgcaagccaacccatcgttgaccgaattaagcctgtgtacaaatgagctgggtgatgctggagttaccttagtcctgcagggcttgcagtctggcacgtgcaagattgaaaaactgtccctccagaactgttgtctgacgaagactggttgcggtgtattaggcgacatgcttcgttcaatgcccaccctgcgcgcactgtatctgaatgataacccgttgggcgatgcgggcctccagctgctttgcagtgggctggtggacgaaaattgtcacctggagaaactgcaggtggaatactgcaatctcacagcagcctcgtgcgaaagcttggcgagcgctctgcgtgcctcgcgccattttaaagaattagcggtttcgaacaacgaactgggtgaagcaggcgtgcgcgtactttgtcgtgggctggtggagagtccatgccaactggaggttctgaaactggaaaattgtggattgacctctgcctcctgcgaggatctttgtctggtggtcgctagcaaaccaagcctccaggaattggaccttggcatgaacaaattaggtgaccaaggcatcgcaacgttatgcccgaccctgcttcacccttcatgccagattcgtgttttgtggctctggaactgtgatatcaccaccgccggctgccgcgacctctgtcaggtattacgcgcgaagccgtccctcaaagagctgagtcttgcgggtaatgccttgggagatgaaggcgcacgtctcttgtgcgaatcgttattagaaccgggctgccagctcgaaagcctttgggtgaaaagctgttctttcactgctgcttcatgccagcattttagttcgatgttgacgcgcaacaagtgtcttgttgagctccaattgagcaataataaattaggtgattgtggcgtgcagcagctttgccaagggttatctcaaccaggtgcggccctccaggttttgtggttgggcgactgtgatgtaggtcatagtggctgtctgagcttagcttccgtgttgcttgtcaaccgttccttacgcgaactcgaccttagtaacaactgcatgggcgaagaagggattctccgtttgatggagagcgttgaacaaccgggatgcgtgcttgaacagttggtcctctatgacatctactggtcggaggagatggatcgtcgtttacgtgccttagaagagcgcaaaccgtcattgcgcgtgattttc

SEQ ID NO: 572 - protein, 468 aa, synthetic construct
  REGION 1..468: note = Variant of RNase inhibitor
MHHHHHHGGSGTMSLDIQCQQLSDARWTELLPLLQQSEVVRLDDCGLTESRCKDISSALQANPSLTELSLCTNELGDAGVTLVLQGLQSGTCKIEKLSLQNCCLTKTGCGVLGDMLRSMPTLRALYLNDNPLGDAGLQLLCSGLVDENCHLEKLQVEYCNLTAASCESLASALRASRHFKELAVSNNELGEAGVRVLCRGLVESPCQLEVLKLENCGLTSASCEDLCLVVASKPSLQELDLGMNKLGDQGIATLCPTLLHPSCQIRVLWLWNCDITTAGCRDLCQVLRAKPSLKELSLAGNALGDEGARLLCESLLEPGCQLESLWVKSCSFTAASCQHFSSMLTRNKCLVELQLSNNKLGDCGVQQLCQGLSQPGAALQVLWLGDCDVGHSGCLSLASVLLVNRSLRELDLSNNCMGEEGILRLMESVEQPGCVLEQLVLYDIYWSEEMDRRLRALEERKPSLRVIF

SEQ ID NO: 573 - DNA, 1404 bp, synthetic construct
  misc_feature 1..1404: note = Variant of RNase inhibitor
  source 1..1404: mol_type = other DNA
atgcaccatcatcatcatcatggcggtagcggcacgatgtctctggatattcagtgtcaacaattgtcagatgcgcgttggactgaactgttaccgcttctgcaacagtcggaagtggtgcgcctggatgactgcggcctcactgagagtcgctgcaaagacatcagtagtgcactgcaagccaacccatcgttgaccgaattaagcctgtgtacaaatgagctgggtgatgctggagttaccttagtcctgcagggcttgcagtctggcacgtgcaagattgaaaaactgtccctccagaactgttgtctgacgaagactggttgcggtgtattaggcgacatgcttcgttcaatgcccaccctgcgcgcactgtatctgaatgataacccgttgggcgatgcgggcctccagctgctttgctccgggctggtggacgaaaattgtcacctggagaaactgcaggtggaatactgcaatctcacagcagcctcgtgcgaaagcttggcgagcgctctgcgtgccaaacgccattttaaagaattagcggtttcgaacaacgaactgggtgaagcaggcgtgcgcgtactttgtcgtgggctggtggagagtccatgccaactggaggttctgaaactggaaaattgtggattgacctctgcctcctgcgaggatctttgtctggtggtcgctagcaaaccaagcctccaggaattggaccttggcatgaacaaattaggtgaccaaggcatcgcaacgttatgcccgaccctgcttcacccttcatgccagattcgtgttttgtggctctggaactgtgatatcaccaccgccggctgccgcgacctctgtcaggtattacgcgcgaagtcgtccctcaaagagctgagtcttgcgggtaatgccttgggagatgaaggcgcacgtctcttgtgcgaatcgttattagaaccggcctgccagctcgaaagcctttgggtgaaaagctgttctttcactgctgcttcatgccagcattttagtatgatgttgacgcgcaacaagtgtcttgttgagctccaattgagcaataataaattaggtgattgtggcgtgcagcagctttgccaagggttatctcaaccaggtgcggccctccaggttttgtggttgggcgactgtgatgtaggtcatagtggctgtctgagcttagcttccgtgttgcttgtcaaccgttccttacgcgaactcgaccttagtaacaactgcatgggcgaagaagggattctccgtttgatggagagcgttgaacaaccgggatgcgtgcttgaacagttggtcctctatgacatctactggtcggaggagatggatcgtcgtttacgtgccttagaagagcgcaaaccgtcattgcgcgtgattttc

SEQ ID NO: 574 - protein, 468 aa, synthetic construct
  REGION 1..468: note = Variant of RNase inhibitor
MHHHHHHGGSGTMSLDIQCQQLSDARWTELLPLLQQSEVVRLDDCGLTESRCKDISSALQANPSLTELSLCTNELGDAGVTLVLQGLQSGTCKIEKLSLQNCCLTKTGCGVLGDMLRSMPTLRALYLNDNPLGDAGLQLLCSGLVDENCHLEKLQVEYCNLTAASCESLASALRAKRHFKELAVSNNELGEAGVRVLCRGLVESPCQLEVLKLENCGLTSASCEDLCLVVASKPSLQELDLGMNKLGDQGIATLCPTLLHPSCQIRVLWLWNCDITTAGCRDLCQVLRAKSSLKELSLAGNALGDEGARLLCESLLEPACQLESLWVKSCSFTAASCQHFSMMLTRNKCLVELQLSNNKLGDCGVQQLCQGLSQPGAALQVLWLGDCDVGHSGCLSLASVLLVNRSLRELDLSNNCMGEEGILRLMESVEQPGCVLEQLVLYDIYWSEEMDRRLRALEERKPSLRVIF

SEQ ID NO: 575 - DNA, 1404 bp, synthetic construct
  misc_feature 1..1404: note = Variant of RNase inhibitor
  source 1..1404: mol_type = other DNA
atgcaccatcatcatcatcatggcggtagcggcacgatgtctctggatattcagtgtcaacaattgtcagatgcgcgttggactgaactgttaccgcttctgcaacagtcggaagtggtgcgcctggatgactgcggcctcactgagagtcgctgcaaagacatcagtagtgcactgcaagccaacccacgtttgaccgaattaagcctgtgtacaaatgagctgggtgatgctggagttaccttagtcctgcagggcttgcagtctggcacgtgcaagattgaaaaactgtccctccagaactgttgtctgacgaagaccggttgcggtgtattaggcgacatgcttcgttcaatgcccaccctgcgcgcactgtatctgaatgataacccgttgggcgatgcgggcctccagctgctttgcagtgggctggtggacgaaaattgtcacctggagaaactgcaggtggaatactgcaatctcacagcagcctcgtgcgaaagcttggcgagcgctctgcgtgccaaacgtcattttaaagaattagcggtttcgaacaacgaactgggtgaagcaggcgtgcgcgtactttgtcgtgggctggtggagagtccatgccaactggaggttctgaaactggaaaattgtggattgacctctgcctcctgcgaggatctttgtcgtgtggtcgctagcaaaccaagcctccaggaattggaccttggcatgaacaaattaggtgaccaaggcatcgcaacgttatgcccgaccctgcttcacccttcatgccagattcgtgttttgtggctctggaactgtgatatcaccaccgccggctgccgcgacctctgtcaggtattacgcgcgaagccgtccctcaaagagctgagtcttgcgggtaatgccttgggagatgaaggcgcacgtctcttgtgcgaatcgttattagaaccggcctgccagctcgaaagcctttgggtgaaaagctgttctttcactgctgcttcatgccagcattttagttcgatgttgacgcgcaacaagtgtcttgttgagctccaattgagcaataataaattaggtgattgtggcgtgcagcagctttgccaagggttatctcaaccaggtgcggccctccaggttttgtggttgggcgactgtgatgtaggtcatagtggctgtctgagcttagcttccgtgttgcttgtcaaccgttccttacgcgaactcgaccttagtaacaactgcatgggcgaagaagggattctccgtttgatggagagcgttgaacaaccgggatgcgtgcttgaacagttggtcctctatgacatctactggtcggaggagatggatcgtcgtttacgtgccttagaagagcgcaaaccgtcattgcgcgtgattttc

SEQ ID NO: 576 - protein, 468 aa, synthetic construct
  REGION 1..468: note = Variant of RNase inhibitor
MHHHHHHGGSGTMSLDIQCQQLSDARWTELLPLLQQSEVVRLDDCGLTESRCKDISSALQANPRLTELSLCTNELGDAGVTLVLQGLQSGTCKIEKLSLQNCCLTKTGCGVLGDMLRSMPTLRALYLNDNPLGDAGLQLLCSGLVDENCHLEKLQVEYCNLTAASCESLASALRAKRHFKELAVSNNELGEAGVRVLCRGLVESPCQLEVLKLENCGLTSASCEDLCRVVASKPSLQELDLGMNKLGDQGIATLCPTLLHPSCQIRVLWLWNCDITTAGCRDLCQVLRAKPSLKELSLAGNALGDEGARLLCESLLEPACQLESLWVKSCSFTAASCQHFSSMLTRNKCLVELQLSNNKLGDCGVQQLCQGLSQPGAALQVLWLGDCDVGHSGCLSLASVLLVNRSLRELDLSNNCMGEEGILRLMESVEQPGCVLEQLVLYDIYWSEEMDRRLRALEERKPSLRVIF

SEQ ID NO: 577 - DNA, 1404 bp, synthetic construct
  misc_feature 1..1404: note = Variant of RNase inhibitor
  source 1..1404: mol_type = other DNA
atgcaccatcatcatcatcatggcggtagcggcacgatgtctctggatattcagtgtcaacaattgtcagatgcgcgttggactgaactgttaccgcttctgcaacagtcggaagtggtgcgcctggatgactgcggcctcactgagagtcgctgcaaagacatcagtagtgcactgcaagccaacccacgtttgaccgaattaagcctgtgtacaaatgagctgggtgatgctggagttaccttagtcctgcagggcttgcagtctggcacgtgcaagattgaaaaactgtccctccagaactgttgtctgacgaaggatggttgcggtgtattaggcgacatgcttcgttcaatgcccaccctgcgcgcactgtatctgaatgataacccgttgggcgatgcgggcctccagctgctttgccaggggctggtggacgaaaattgtcacctggagaaactgcaggtggaatactgcaatctcacagcagcctcgtgcgaaagcttggcgagcgctctgcgtgcctcgcgccattttaaagaattagcggtttcgaacaacgaactgggtgaagcaggcgtgcgcgtactttgtcgtgggctggtggagagtccatgccaactggaggttctgaaactggaaaattgtggattgacctctgcctcctgcgaggatctttgtctggtggtcgctagcaaaccaagcctccaggaattggaccttggcatgaacaaattaggtgaccaaggcatcgcaacgttatgcccgaccctgcttcacccttcatgccagattcgtgttttgtggctctggaactgtgatatcaccaccgccggctgccgcgacctctgtcaggtattacgcgcgaagccgtccctcaaagagctgagtcttgcgggtaatgccttgggagatgaaggcgcacgtctcttgtgcgaatcgttattagaaccgggctgccagctcgaaagcctttgggtgaaaagctgttctttcactgctgcttcatgccagcattttagtatgatgttgacgcgcaacaagtgtcttgttgagctccaattgagcaataataaattaggtgattgtggcgtgcagcagctttgccaagggttatctcaaccaggtgcggccctccaggttttgtggttgggcgactgtgatgtaggtcatagtggctgtctgagcttagcttccgtgttgcttgtcaaccgttccttacgcgaactcgaccttagtaacaactgcatgggcgaagaagggattctccgtttgatggagagcgttgaacaaccgggatgcgtgcttgaacagttggtcctctatgacatctactggtcggaggagatggatcgtcgtttacgtgccttagaagagcgcaaaccgtcattgcgcgtgattttc

SEQ ID NO: 578 - protein, 468 aa, synthetic construct
  REGION 1..468: note = Variant of RNase inhibitor
MHHHHHHGGSGTMSLDIQCQQLSDARWTELLPLLQQSEVVRLDDCGLTESRCKDISSALQANPRLTELSLCTNELGDAGVTLVLQGLQSGTCKIEKLSLQNCCLTKDGCGVLGDMLRSMPTLRALYLNDNPLGDAGLQLLCQGLVDENCHLEKLQVEYCNLTAASCESLASALRASRHFKELAVSNNELGEAGVRVLCRGLVESPCQLEVLKLENCGLTSASCEDLCLVVASKPSLQELDLGMNKLGDQGIATLCPTLLHPSCQIRVLWLWNCDITTAGCRDLCQVLRAKPSLKELSLAGNALGDEGARLLCESLLEPGCQLESLWVKSCSFTAASCQHFSMMLTRNKCLVELQLSNNKLGDCGVQQLCQGLSQPGAALQVLWLGDCDVGHSGCLSLASVLLVNRSLRELDLSNNCMGEEGILRLMESVEQPGCVLEQLVLYDIYWSEEMDRRLRALEERKPSLRVIF

SEQ ID NO: 579 - DNA, 1404 bp, synthetic construct
  misc_feature 1..1404: note = Variant of RNase inhibitor
  source 1..1404: mol_type = other DNA
atgcaccatcatcatcatcatggcggtagcggcacgatgtctctggatattcagtgtcaacaattgtcagatgcgcgttggactgaactgttaccgcttctgcaacagagcgaagtggtgcgcctggatgactgcggcctcactgagagtcgctgcaaagacatcagtagtgcactgcaagccaacccatcgttgaccgaattaagcctgtgtacaaatgagctgggtgatgctggagttaccttagtcctgcagggcttgcagtctggcacgtgcaagattgaaaaactgtccctccagaactgttgtctgacgaagactggttgcggtgtattaggcgacatgcttcgttcaatgcccaccctgcgcgcactgtatctgaatgataacccgttgggcgatgcgggcctccagctgctttgctccgggctggtggacgaaaattgtcacctggagaaactgcaggtggaatactgcaatctcacagcagcctcgtgcgaaagcttggcgagcgctctgcgtgccaaacgccattttaaagaattagcggtttcgaacaacgaactgggtgaagcaggcgtgcgcgtactttgtcgtgggctggtggagagtccatgccaactggaggttctgaaactggaaaattgtggattgacctctgcctcctgcgaggatctttgtcgtgtggtcgctagcaaaccaagcctccaggaattggaccttggcatgaacaaattaggtgaccaaggcatcgcaacgttatgcccgaccctgcttcacccttcatgccagattcgtgttttgtggctctggaactgtgatatcaccaccgccggctgccgcgacctctgtcaggtattacgcgcgaagccgtccctcaaagagctgagtcttgcgggtaatgccttgggagatgaaggcgcacgtctcttgtgcgaatcgttattagaaccggcctgccagctcgaaagcctttgggtgaaaagctgttctttcactgctgcttcatgccagcattttagttcgatgttgacgcgcaacaagtgtcttgttgagctccaattgagcaataataaattaggtgattgtggcgtgcagcagctttgccaagggttatctcaaccaggtgcggccctccaggttttgtggttgggcgactgtgatgtaggtcatagtggctgtgagagcttagcttccgtgttgcttgtcaaccgttccttacgcgaactcgaccttagtaacaactgcatgggcgaagaagggattctccgtttgatggagagcgttgaacaaccgggatgcgtgcttgaacagttggtcctctatgacatctactggtcggaggagatggatcgtcgtttacgtgccttagaagagcgcaaaccgtcattgcgcgtgattttc

SEQ ID NO: 580 - protein, 468 aa, synthetic construct
  REGION 1..468: note = Variant of RNase inhibitor
MHHHHHHGGSGTMSLDIQCQQLSDARWTELLPLLQQSEVVRLDDCGLTESRCKDISSALQANPSLTELSLCTNELGDAGVTLVLQGLQSGTCKIEKLSLQNCCLTKTGCGVLGDMLRSMPTLRALYLNDNPLGDAGLQLLCSGLVDENCHLEKLQVEYCNLTAASCESLASALRAKRHFKELAVSNNELGEAGVRVLCRGLVESPCQLEVLKLENCGLTSASCEDLCRVVASKPSLQELDLGMNKLGDQGIATLCPTLLHPSCQIRVLWLWNCDITTAGCRDLCQVLRAKPSLKELSLAGNALGDEGARLLCESLLEPACQLESLWVKSCSFTAASCQHFSSMLTRNKCLVELQLSNNKLGDCGVQQLCQGLSQPGAALQVLWLGDCDVGHSGCESLASVLLVNRSLRELDLSNNCMGEEGILRLMESVEQPGCVLEQLVLYDIYWSEEMDRRLRALEERKPSLRVIF

SEQ ID NO: 581 - DNA, 1404 bp, synthetic construct
  misc_feature 1..1404: note = Variant of RNase inhibitor
  source 1..1404: mol_type = other DNA
atgcaccatcatcatcatcatggcggtagcggcacgatgtctctggatattcagtgtcaacaattgtcagatgcgcgttggactgaactgttaccgcttctgcaacagtcggaagtggtgcgcctggatgactgcggcctcactgagagtcgctgcaaagacatcagtagtgcactgaaagccaacccacgtttgaccgaattaagcctgtgtacaaatgagctgggtgatgctggagttaccttagtcctgcagggcttgcagtctggcacgtgcaagattgaaaaactgtccctccagaactgttgtctgacgaaggatggttgcggtgtattaggcgacatgcttcgttcaatgcccaccctgcgcgcactgtatctgaatgataacccgttgggcgatgcgggcctccagctgctttgccaggggctggtggacgaaaattgtcacctggagaaactgcaggtggaatactgcaatctcacagcagcctcgtgcgaaagcttggcgagcgctctgcgtgccaaacgccattttaaagaattagcggtttcgaacaacgaactgggtgaagcaggcgtgcgcgtactttgtcgtgggctggtggagagtccatgccaactggaggttctgaaactggaaaattgtggattgacctctgcctcctgcgaggatctttgtcgtgtggtcgctagcaaaccaagcctccaggaattggaccttggcatgaacaaattaggtgaccaaggcatcgcaacgttatgcccgaccctgcttcacccttcatgccagattcgtgttttgtggctctggaactgtgatatcaccaccgccggctgccgcgacctctgtcaggtattacgcgcgaagtcgtccctcaaagagctgagtcttgcgggtaatgccttgggagatgaaggcgcacgtctcttgtgcgaatcgttattagaaccgggctgccagctcgaaagcctttgggtgaaaagctgttctttcactgctgcttcatgccagcattttagtatgatgttgacgcgcaacaagtgtcttgttgagctccaattgagcaataataaattaggtgattgtggcgtgcagcagctttgccaagggttatctcaaccaggtgcggccctccaggttttgtggttgggcgactgtgatgtaggtcatagtggctgtgctagcttagcttccgtgttgcttgtcaaccgttccttacgcgaactcgaccttagtaacaactgcatgggcgaagaagggattctccgtttgatggagagcgttgaacaaccgggatgcgtgcttgaacagttggtcctctatgacatctactggtcggaggagatggatcgtcgtttacgtgccttagaagagcgcaaaccgtcattgcgcgtgattttc

SEQ ID NO: 582 - protein, 468 aa, synthetic construct
  REGION 1..468: note = Variant of RNase inhibitor
MHHHHHHGGSGTMSLDIQCQQLSDARWTELLPLLQQSEVVRLDDCGLTESRCKDISSALKANPRLTELSLCTNELGDAGVTLVLQGLQSGTCKIEKLSLQNCCLTKDGCGVLGDMLRSMPTLRALYLNDNPLGDAGLQLLCQGLVDENCHLEKLQVEYCNLTAASCESLASALRAKRHFKELAVSNNELGEAGVRVLCRGLVESPCQLEVLKLENCGLTSASCEDLCRVVASKPSLQELDLGMNKLGDQGIATLCPTLLHPSCQIRVLWLWNCDITTAGCRDLCQVLRAKSSLKELSLAGNALGDEGARLLCESLLEPGCQLESLWVKSCSFTAASCQHFSMMLTRNKCLVELQLSNNKLGDCGVQQLCQGLSQPGAALQVLWLGDCDVGHSGCASLASVLLVNRSLRELDLSNNCMGEEGILRLMESVEQPGCVLEQLVLYDIYWSEEMDRRLRALEERKPSLRVIF

SEQ ID NO: 583 - DNA, 1404 bp, synthetic construct
  misc_feature 1..1404: note = Variant of RNase inhibitor
  source 1..1404: mol_type = other DNA
atgcaccatcatcatcatcatggcggtagcggcacgatgtctctggatattcagtgtcaacaattgtcagatgcgcgttggactgaactgttaccgcttctgcaacaggcggaagtggtgcgcctggatgactgcggcctcactgagagtcgctgcaaagacatcagtagtgcactgcaagccaacccatcgttgatcgaattaagcctgtgtacaaatgagctgggtgatgctggagttaccttagtcctgcagggcttgcagtctggcacgtgcaagattgaaaaactgtccctccagaactgttgtctgacgaaggatggttgcggtgtattaggcgacatgcttcgttcaatgcccaccctgcgcgcactgtatctgaatgataacccgttgggcgatgcgggcctccagctgctttgctccgggctggtggacgaaaattgtcacctggagaaactgcaggtggaatactgcaatctcacagcagcctcgtgcgaaagcttggcgagcgctctgcgtgccaaacgccattttaaagaattagcggtttcgaacaacgaactgggtgaagcaggcgtgcgcgtactttgtcgtgggctggtggagagtccatgccaactggaggttctgaaactggaaaattgtggattgacctctgcctcctgcgaggatctttgtcgtgtggtcgctagcaaaccaagcctccaggaattggaccttggcatgaacaaattaggtgaccaaggcatcgcaacgttatgcccgaccctgcttcacccttcatgccagattcgtgttttgtggctctggaactgtgatatcaccaccgccggctgccgcgacctctgtcaggtattacgcgcgaagtcgtccctcaaagagctgagtcttgcgggtaatgccttgggagatgaaggcgcacgtctcttgtgcgaatcgttattaagtccggcctgccagctcgaaagcctttgggtgaaaagctgttctttcactgctgcttcatgccagcattttagttcgatgttgacgcgcaacaagtgtcttgttgagctccaattgagcaataataaattaggtgattgtggcgtgcagcagctttgccaagggttatctcaaccaggtgcggccctccaggttttgtggttgggcgactgtgatgtaggtcatagtggctgtgctagcttagcttccgtgttgcttgtcaaccgttccttacgcgaactcgaccttagtaacaactgcatgggcgaagaagggattctccgtttgatggagagcgttgaacaaccgggatgcgtgcttgaacagttggtcctctatgacatctactggtcggaggagatggatcgtcgtttacgtgccttagaagagcgcaaaccgtcattgcgcgtgattttc

SEQ ID NO: 584 - protein, 468 aa, synthetic construct
  REGION 1..468: note = Variant of RNase inhibitor
MHHHHHHGGSGTMSLDIQCQQLSDARWTELLPLLQQAEVVRLDDCGLTESRCKDISSALQANPSLIELSLCTNELGDAGVTLVLQGLQSGTCKIEKLSLQNCCLTKDGCGVLGDMLRSMPTLRALYLNDNPLGDAGLQLLCSGLVDENCHLEKLQVEYCNLTAASCESLASALRAKRHFKELAVSNNELGEAGVRVLCRGLVESPCQLEVLKLENCGLTSASCEDLCRVVASKPSLQELDLGMNKLGDQGIATLCPTLLHPSCQIRVLWLWNCDITTAGCRDLCQVLRAKSSLKELSLAGNALGDEGARLLCESLLSPACQLESLWVKSCSFTAASCQHFSSMLTRNKCLVELQLSNNKLGDCGVQQLCQGLSQPGAALQVLWLGDCDVGHSGCASLASVLLVNRSLRELDLSNNCMGEEGILRLMESVEQPGCVLEQLVLYDIYWSEEMDRRLRALEERKPSLRVIF

SEQ ID NO: 585 - DNA, 1404 bp, synthetic construct
  misc_feature 1..1404: note = Variant of RNase inhibitor
  source 1..1404: mol_type = other DNA
atgcaccatcatcatcatcatggcggtagcggcacgatgtctctggatattcagtgtcaacaattgtcagatgcgcgttggactgaactgttaccgcttctgcaacaggcggaagtggtgcgcctggatgactgcggcctcactgagagtcgctgcaaagacatcagtagtgcactgcaagccaacccaagtttgatcgaattaagcctgtgtacaaatgagctgggtgatgctggagttaccttagtcctgcagggcttgcagtctggcacgtgcaagattgaaaaactgtccctccagaactgttgtctgacgaaggatggttgcggtgtattaggcgacatgcttcgttcaatgcccaccctgcgcgcactgtatctgaatgataacccgttgggcgatgcgggcctccagctgctttgcagtgggctggtggacgaaaattgtcacctggagaaactgcaggtggaatactgcaatctcacagcagcctcgtgcgaaagcttggcgagcgctctgcgtgccaagcgccattttaaagaattagcggtttcgaacaacgaactgggtgaagcaggcgtgcgcgtactttgtcgtgggctggtggagagtccatgccaactggaggttctgaaactggaaaattgtggattgacctctgcctcctgcgaggatctttgtcgtgtggtcgctagcaaaccaagcctccaggaattggaccttggcatgaacaaattaggtgaccaaggcatcgcaacgttatgcccgaccctgcttcacccttcatgccagattcgtgttttgtggctctggaactgtgatatcaccaccgccggctgccgcgacctctgtcaggtattacgcgcgaagccgtccctcaaagagctgagtcttgcgggtaatgccttgggagatgaaggcgcacgtctcttgtgcgaatcgttattaagtccggcctgccagctcgaaagcctttgggtgaaaagctgttctttcactgctgcttcatgccagcattttagttcgatgttgacgcgcaacaagtgtcttgttgagctccaattgagcaataataaattaggtgattgtggcgtgcagcagctttgccaagggttatctcaaccaggtgcggccctccaggttttgtggttgggcgactgtgatgtaggtcatagtggctgtctgagcttagcttccgtgttgcttgtcaaccgttccttacgcgaactcgaccttagtaacaactgcatgggcgaagaagggattctccgtttgatggagagcgttgaacaaccgggatgcgtgcttgaacagttggtcctctatgacatctactggtcggaggagatggatcgtcgtttacgtgccttagaagagcgcaaaccgtcattgcgcgtgattttc

SEQ ID NO: 586 - protein, 468 aa, synthetic construct
  REGION 1..468: note = Variant of RNase inhibitor
MHHHHHHGGSGTMSLDIQCQQLSDARWTELLPLLQQAEVVRLDDCGLTESRCKDISSALQANPSLIELSLCTNELGDAGVTLVLQGLQSGTCKIEKLSLQNCCLTKDGCGVLGDMLRSMPTLRALYLNDNPLGDAGLQLLCSGLVDENCHLEKLQVEYCNLTAASCESLASALRAKRHFKELAVSNNELGEAGVRVLCRGLVESPCQLEVLKLENCGLTSASCEDLCRVVASKPSLQELDLGMNKLGDQGIATLCPTLLHPSCQIRVLWLWNCDITTAGCRDLCQVLRAKPSLKELSLAGNALGDEGARLLCESLLSPACQLESLWVKSCSFTAASCQHFSSMLTRNKCLVELQLSNNKLGDCGVQQLCQGLSQPGAALQVLWLGDCDVGHSGCLSLASVLLVNRSLRELDLSNNCMGEEGILRLMESVEQPGCVLEQLVLYDIYWSEEMDRRLRALEERKPSLRVIF

SEQ ID NO: 587 - DNA, 1404 bp, synthetic construct
  misc_feature 1..1404: note = Variant of RNase inhibitor
  source 1..1404: mol_type = other DNA
atgcaccatcatcatcatcatggcggtagcggcacgatgtctctggatattcagtgtcaacaattgtcagatgcgcgttggactgaactgttaccgcttctgcaacaggcggaagtggtgcgcctggatgactgcggcctcactgagagtcgctgcaaagacatcagtagtgcactgcaagccaacccatcgttgaccgaattaagcctgtgtacaaatgagctgggtgatgctggagttaccttagtcctgcagggcttgcagtctggcacgtgcaagattgaaaaactgtccctccagaactgttgtctgacgaagactggttgcggtgtattaggcgacatgcttcgttcaatgcccaccctgcgcgcactgtatctgaatgataacccgttgggcgatgcgggcctccagctgctttgctccgggctggtggacgaaaattgtcacctggagaaactgcaggtggaatactgcaatctcacagcagcctcgtgcgaaagcttggcgagcgctctgcgtgccaaacgtcattttaaagaattagcggtttcgaacaacgaactgggtgaagcaggcgtgcgcgtactttgtcgtgggctggtggagagtccatgccaactggaggttctgaaactggaaaattgtggattgacctctgcctcctgcgaggatctttgtctggtggtcgctagcaaaccaagcctccaggaattggaccttggcatgaacaaattaggtgaccaaggcatcgcaacgttatgcccgaccctgcttcacccttcatgccagattcgtgttttgtggctctggaactgtgatatcaccaccgccggctgccgcgacctctgtcaggtattacgcgcgaagccgtccctcaaagagctgagtcttgcgggtaatgccttgggagatgaaggcgcacgtctcttgtgcgaatcgttattaagtccggcctgccagctcgaaagcctttgggtgaaaagctgttctttcactgctgcttcatgccagcattttagttcgatgttgacgcgcaacaagtgtcttgttgagctccaattgagcaataataaattaggtgattgtggcgtgcagcagctttgccaagggttatctcaaccaggtgcggccctccaggttttgtggttgggcgactgtgatgtaggtcatagtggctgtctgagcttagcttccgtgttgcttgtcaaccgttccttacgcgaactcgaccttagtaacaactgcatgggcgaagaagggattctccgtttgatggagagcgttgaacaaccgggatgcgtgcttgaacagttggtcctctatgacatctactggtcggaggagatggatcgtcgtttacgtgccttagaagagcgcaaaccgtcattgcgcgtgattttc

SEQ ID NO: 588 - protein, 468 aa, synthetic construct
  REGION 1..468: note = Variant of RNase inhibitor
MHHHHHHGGSGTMSLDIQCQQLSDARWTELLPLLQQAEVVRLDDCGLTESRCKDISSALQANPSLTELSLCTNELGDAGVTLVLQGLQSGTCKIEKLSLQNCCLTKTGCGVLGDMLRSMPTLRALYLNDNPLGDAGLQLLCSGLVDENCHLEKLQVEYCNLTAASCESLASALRAKRHFKELAVSNNELGEAGVRVLCRGLVESPCQLEVLKLENCGLTSASCEDLCLVVASKPSLQELDLGMNKLGDQGIATLCPTLLHPSCQIRVLWLWNCDITTAGCRDLCQVLRAKPSLKELSLAGNALGDEGARLLCESLLSPACQLESLWVKSCSFTAASCQHFSSMLTRNKCLVELQLSNNKLGDCGVQQLCQGLSQPGAALQVLWLGDCDVGHSGCLSLASVLLVNRSLRELDLSNNCMGEEGILRLMESVEQPGCVLEQLVLYDIYWSEEMDRRLRALEERKPSLRVIF

SEQ ID NO: 589 - DNA, 1404 bp, synthetic construct
  misc_feature 1..1404: note = Variant of RNase inhibitor
  source 1..1404: mol_type = other DNA
atgcaccatcatcatcatcatggcggtagcggcacgatgtctctggatattcagtgtcaacaattgtcagatgcgcgttggactgaactgttaccgcttctgcaacagtcggaagtggtgcgcctggatgactgcggcctcactgagagtcgctgcaaagacatcagtagtgcactgcaagccaacccatcgttgaccgaattaagcctgtgtacaaatgagctgggtgatgctggagttaccttagtcctgcagggcttgcagtctggcacgtgcaagattgaaaaactgtccctccagaactgttgtctgacgaagaccggttgcggtgtattaggcgacatgcttcgttcaatgcccaccctgcgcgcactgtatctgaatgataacccgttgggcgatgcgggcctccagctgctttgctccgggctggtggacgaaaattgtcacctggagaaactgcaggtggaatactgcaatctcacagcagcctcgtgcgaaagcttggcgagcgctctgcgtgccaaacgccattttaaagaattagcggtttcgaacaacgaactgggtgaagcaggcgtgcgcgtactttgtcgtgggctggtggagagtccatgccaactggaggttctgaaactggaaaattgtggattgacctctgcctcctgcgaggatctttgtcgtgtggtcgctagcaaaccaagcctccaggaattggaccttggcatgaacaaattaggtgaccaaggcatcgcaacgttatgcccgaccctgcttcacccttcatgccagattcgtgttttgtggctctggaactgtgatatcaccaccgccggctgccgcgacctctgtcaggtattacgcgcgaagccgtccctcaaagagctgagtcttgcgggtaatgccttgggagatgaaggcgcacgtctcttgtgcgaatcgttattagaaccggcctgccagctcgaaagcctttgggtgaaaagctgttctttcactgctgcttcatgccagcattttagtgcgatgttgacgcgcaacaagtgtcttgttgagctccaattgagcaataataaattaggtgattgtggcgtgcagcagctttgccaagggttatctcaaccaggtgcggccctccaggttttgtggttgggcgactgtgatgtaggtcatagtggctgtctgagcttagcttccgtgttgcttgtcaaccgttccttacgcgaactcgaccttagtaacaactgcatgggcgaagaagggattctccgtttgatggagagcgttgaacaaccgggatgcgtgcttgaacagttggtcctctatgacatctactggtcggaggagatggatcgtcgtttacgtgccttagaagagcgcaaaccgtcattgcgcgtgattttc

SEQ ID NO: 590 - protein, 468 aa, synthetic construct
  REGION 1..468: note = Variant of RNase inhibitor
MHHHHHHGGSGTMSLDIQCQQLSDARWTELLPLLQQSEVVRLDDCGLTESRCKDISSALQANPSLTELSLCTNELGDAGVTLVLQGLQSGTCKIEKLSLQNCCLTKTGCGVLGDMLRSMPTLRALYLNDNPLGDAGLQLLCSGLVDENCHLEKLQVEYCNLTAASCESLASALRAKRHFKELAVSNNELGEAGVRVLCRGLVESPCQLEVLKLENCGLTSASCEDLCRVVASKPSLQELDLGMNKLGDQGIATLCPTLLHPSCQIRVLWLWNCDITTAGCRDLCQVLRAKPSLKELSLAGNALGDEGARLLCESLLEPACQLESLWVKSCSFTAASCQHFSAMLTRNKCLVELQLSNNKLGDCGVQQLCQGLSQPGAALQVLWLGDCDVGHSGCLSLASVLLVNRSLRELDLSNNCMGEEGILRLMESVEQPGCVLEQLVLYDIYWSEEMDRRLRALEERKPSLRVIF

SEQ ID NO: 591 - DNA, 1404 bp, synthetic construct
  misc_feature 1..1404: note = Variant of RNase inhibitor
  source 1..1404: mol_type = other DNA
atgcaccatcatcatcatcatggcggtagcggcacgatgtctctggatattcagtgtcaacaattgtcagatgcgcgttggactgaactgttaccgcttctgcaacagtcggaagtggtgcgcctggatgactgcggcctcactgagagtcgctgcaaagacatcagtagtgcactgcaagccaacccatcgttgatcgaattaagcctgtgtacaaatgagctgggtgatgctggagttaccttagtcctgcagggcttgcagtctggcacgtgcaagattgaaaaactgtccctccagaactgttgtctgacgaagactggttgcggtgtattaggcgacatgcttcgttcaatgcccaccctgcgcgcactgtatctgaatgataacccgttgggcgatgcgggcctccagctgctttgccaggggctggtggacgaaaattgtcacctggagaaactgcaggtggaatactgcaatctcacagcagcctcgtgcgaaagcttggcgagcgctctgcgtgccaaacgtcattttaaagaattagcggtttcgaacaacgaactgggtgaagcaggcgtgcgcgtactttgtcgtgggctggtggagagtccatgccaactggaggttctgaaactggaaaattgtggattgacctctgcctcctgcgaggatctttgtcgtgtggtcgctagcaaaccaagcctccaggaattggaccttggcatgaacaaattaggtgaccaaggcatcgcaacgttatgcccgaccctgcttcacccttcatgccagattcgtgttttgtggctctggaactgtgatatcaccaccgccggctgccgcgacctctgtcaggtattacgcgcgaagccgtccctcaaagagctgagtcttgcgggtaatgccttgggagatgaaggcgcacgtctcttgtgcgaatcgttattagaaccgggctgccagctcgaaagcctttgggtgaaaagctgttctttcactgctgcttcatgccagcattttagtatgatgttgacgcgcaacaagtgtcttgttgagctccaattgagcaataataaattaggtgattgtggcgtgcagcagctttgccaagggttatctcaaccaggtgcggccctccaggttttgtggttgggcgactgtgatgtaggtcatagtggctgtctgagcttagcttccgtgttgcttgtcaaccgttccttacgcgaactcgaccttagtaacaactgcatgggcgaagaagggattctccgtttgatggagagcgttgaacaaccgggatgcgtgcttgaacagttggtcctctatgacatctactggtcggaggagatggatcgtcgtttacgtgccttagaagagcgcaaaccgtcattgcgcgtgattttc

SEQ ID NO: 592 - protein, 468 aa, synthetic construct
  REGION 1..468: note = Variant of RNase inhibitor
MHHHHHHGGSGTMSLDIQCQQLSDARWTELLPLLQQSEVVRLDDCGLTESRCKDISSALQANPSLIELSLCTNELGDAGVTLVLQGLQSGTCKIEKLSLQNCCLTKTGCGVLGDMLRSMPTLRALYLNDNPLGDAGLQLLCQGLVDENCHLEKLQVEYCNLTAASCESLASALRAKRHFKELAVSNNELGEAGVRVLCRGLVESPCQLEVLKLENCGLTSASCEDLCRVVASKPSLQELDLGMNKLGDQGIATLCPTLLHPSCQIRVLWLWNCDITTAGCRDLCQVLRAKPSLKELSLAGNALGDEGARLLCESLLEPGCQLESLWVKSCSFTAASCQHFSMMLTRNKCLVELQLSNNKLGDCGVQQLCQGLSQPGAALQVLWLGDCDVGHSGCLSLASVLLVNRSLRELDLSNNCMGEEGILRLMESVEQPGCVLEQLVLYDIYWSEEMDRRLRALEERKPSLRVIF

SEQ ID NO: 593 - DNA, 1404 bp, synthetic construct
  misc_feature 1..1404: note = Variant of RNase inhibitor
  source 1..1404: mol_type = other DNA
atgcaccatcatcatcatcatggcggtagcggcacgatgtctctggatattcagtgtcaacaattgtcagatgcgcgttggactgaactgttaccgcttctgcaacagtcggaagtggtgcgcctggatgactgcggcctcactgagagtcgctgcaaagacatcagtagtgcactgcaagccaacccatcgttgatcgaattaagcctgtgtacaaatgagctgggtgatgctggagttaccttagtcctgcagggcttgcagtctggcacgtgcaagattgaaaaactgtccctccagaactgttgtctgacgaagactggttgcggtgtattaggcgacatgcttcgttcaatgcccaccctgcgcgcactgtatctgaatgataacccgttgggcgatgcgggcctccagctgctttgccaggggctggtggacgaaaattgtcacctggagaaactgcaggtggaatactgcaatctcacagcagcctcgtgcgaaagcttggcgagcgctctgcgtgccaaacgccattttaaagaattagcggtttcgaacaacgaactgggtgaagcaggcgtgcgcgtactttgtcgtgggctggtggagagtccatgccaactggaggttctgaaactggaaaattgtggattgacctctgcctcctgcgaggatctttgtctggtggtcgctagcaaaccaagcctccaggaattggaccttggcatgaacaaattaggtgaccaaggcatcgcaacgttatgcccgaccctgcttcacccttcatgccagattcgtgttttgtggctctggaactgtgatatcaccaccgccggctgccgcgacctctgtcaggtattacgcgcgaagccgtccctcaaagagctgagtcttgcgggtaatgccttgggagatgaaggcgcacgtctcttgtgcgaatcgttattagaaccggcctgccagctcgaaagcctttgggtgaaaagctgttctttcactgctgcttcatgccagcattttagttcgatgttgacgcgcaacaagtgtcttgttgagctccaattgagcaataataaattaggtgattgtggcgtgcagcagctttgccaagggttatctcaaccaggtgcggccctccaggttttgtggttgggcgactgtgatgtaggtcatagtggctgtctgagcttagcttccgtgttgcttgtcaaccgttccttacgcgaactcgaccttagtaacaactgcatgggcgaagaagggattctccgtttgatggagagcgttgaacaaccgggatgcgtgcttgaacagttggtcctctatgacatctactggtcggaggagatggatcgtcgtttacgtgccttagaagagcgcaaaccgtcattgcgcgtgattttc

SEQ ID NO: 594 - protein, 468 aa, synthetic construct
  REGION 1..468: note = Variant of RNase inhibitor
MHHHHHHGGSGTMSLDIQCQQLSDARWTELLPLLQQSEVVRLDDCGLTESRCKDISSALQANPSLIELSLCTNELGDAGVTLVLQGLQSGTCKIEKLSLQNCCLTKTGCGVLGDMLRSMPTLRALYLNDNPLGDAGLQLLCQGLVDENCHLEKLQVEYCNLTAASCESLASALRAKRHFKELAVSNNELGEAGVRVLCRGLVESPCQLEVLKLENCGLTSASCEDLCLVVASKPSLQELDLGMNKLGDQGIATLCPTLLHPSCQIRVLWLWNCDITTAGCRDLCQVLRAKPSLKELSLAGNALGDEGARLLCESLLEPACQLESLWVKSCSFTAASCQHFSSMLTRNKCLVELQLSNNKLGDCGVQQLCQGLSQPGAALQVLWLGDCDVGHSGCLSLASVLLVNRSLRELDLSNNCMGEEGILRLMESVEQPGCVLEQLVLYDIYWSEEMDRRLRALEERKPSLRVIF

SEQ ID NO: 595 - DNA, 1404 bp, synthetic construct
  misc_feature 1..1404: note = Variant of RNase inhibitor
  source 1..1404: mol_type = other DNA
atgcaccatcatcatcatcatggcggtagcggcacgatgtctctggatattcagtgtcaacaattgtcagatgcgcgttggactgaactgttaccgcttctgcaacagagcgaagtggtgcgcctggatgactgcggcctcactgagagtcgctgcaaagacatcagtagtgcactgcaagccaacccatcgttgaccgaattaagcctgtgtacaaatgagctgggtgatgctggagttaccttagtcctgcagggcttgcagtctggcacgtgcaagattgaaaaactgtccctccagaactgttgtctgacgaagactggttgcggtgtattaggcgacatgcttcgttcaatgcccaccctgcgcgcactgtatctgaatgataacccgttgggcgatgcgggcctccagctgctttgctccgggctggtggacgaaaattgtcacctggagaaactgcaggtggaatactgcaatctcacagcagcctcgtgcgaaagcttggcgagcgctctgcgtgccaaacgccattttaaagaattagcggtttcgaacaacgaactgggtgaagcaggcgtgcgcgtactttgtcgtgggctggtggagagtccatgccaactggaggttctgaaactggaaaattgtggattgacctctgcctcctgcgaggatctttgtcgtgtggtcgctagcaaaccaagcctccaggaattggaccttggcatgaacaaattaggtgaccaaggcatcgcaacgttatgcccgaccctgcttcacccttcatgccagattcgtgttttgtggctctggaactgtgatatcaccaccgccggctgccgcgacctctgtcaggtattacgcgcgaagccgtccctcaaagagctgagtcttgcgggtaatgccttgggagatgaaggcgcacgtctcttgtgcgaatcgttattagaaccggcctgccagctcgaaagcctttgggtgaaaagctgttctttcactgctgcttcatgccagcattttagttcgatgttgacgcgcaacaagtgtcttgttgagctccaattgagcaataataaattaggtgatatgggcgtgcagcagctttgccaagggttatctcaaccaggtgcggccctccaggttttgtggttgggcgactgtgatgtaggtcatagtggctgtgcaagcttagcttccgtgttgcttgtcaaccgttccttacgcgaactcgaccttagtaacaactgcatgggcgaagaagggattctccgtttgatggagagcgttgaacaaccgggatgcgtgcttgaacagttggtcctctatgacatctactggtcggaggagatggatcgtcgtttacgtgccttagaagagcgcaaaccgtcattgcgcgtgattttc

SEQ ID NO: 596 - protein, 468 aa, synthetic construct
  REGION 1..468: note = Variant of RNase inhibitor
MHHHHHHGGSGTMSLDIQCQQLSDARWTELLPLLQQSEVVRLDDCGLTESRCKDISSALQANPSLTELSLCTNELGDAGVTLVLQGLQSGTCKIEKLSLQNCCLTKTGCGVLGDMLRSMPTLRALYLNDNPLGDAGLQLLCSGLVDENCHLEKLQVEYCNLTAASCESLASALRAKRHFKELAVSNNELGEAGVRVLCRGLVESPCQLEVLKLENCGLTSASCEDLCRVVASKPSLQELDLGMNKLGDQGIATLCPTLLHPSCQIRVLWLWNCDITTAGCRDLCQVLRAKPSLKELSLAGNALGDEGARLLCESLLEPACQLESLWVKSCSFTAASCQHFSSMLTRNKCLVELQLSNNKLGDMGVQQLCQGLSQPGAALQVLWLGDCDVGHSGCASLASVLLVNRSLRELDLSNNCMGEEGILRLMESVEQPGCVLEQLVLYDIYWSEEMDRRLRALEERKPSLRVIF

SEQ ID NO: 597 - DNA, 1404 bp, synthetic construct
  misc_feature 1..1404: note = Variant of RNase inhibitor
  source 1..1404: mol_type = other DNA
atgcaccatcatcatcatcatggcggtagcggcacgatgtctctggatattcagtgtcaacaattgtcagatgcgcgttggactgaactgttaccgcttctgcaacagagcgaagtggtgcgcctggatgactgcggcctcactgagagtcgctgcaaagacatcagtagtgcactgcaagccaacccatcgttgaccgaattaagcctgtgtacaaatgagctgggtgatgctggagttaccttagtcctgcagggcttgcagtctggcacgtgcaagattgaaaaactgtccctccagaactgttgtctgacgaagactggttgcggtgtattaggcgacatgcttcgttcaatgcccaccctgcgcgcactgtatctgaatgataacccgttgggcgatgcgggcctccagctgctttgccaggggctggtggacgaaaattgtcacctggagaaactgcaggtggaatactgcaatctcacagcagcctcgtgcgaaagcttggcgagcgctctgcgtgccaaacgccattttaaagaattagcggtttcgaacaacgaactgggtgaagcaggcgtgcgcgtactttgtcgtgggctggtggagagtccatgccaactggaggttctgaaactggaaaattgtggattgacctctgcctcctgcgaggatctttgtcgtgtggtcgctagcaaaccaagcctccaggaattggaccttggcatgaacaaattaggtgaccaaggcatcgcaacgttatgcccgaccctgcttcacccttcatgccagattcgtgttttgtggctctggaactgtgatatcaccaccgccggctgccgcgacctctgtcaggtattacgcgcgaagccgtccctcaaagagctgagtcttgcgggtaatgccttgggagatgaaggcgcacgtctcttgtgcgaatcgttattagaaccggcctgccagctcgaaagcctttgggtgaaaagctgttctttcactgctgcttcatgccagcattttagttcgatgttgacgcgcaacaagtgtcttgttgagctccaattgagcaataataaattaggtgattgtggcgtgcagcagctttgccaagggttatctcaaccaggtgcggccctccaggttttgtggttgggcgactgtgatgtaggtcatagtggctgtctgagcttagcttccgtgttgcttgtcaaccgttccttacgcgaactcgaccttagtaacaactgcatgggcgaagaagggattctccgtttgatggagagcgttgaacaaccgggatgcgtgcttgaacagttggtcctctatgacatctactggtcggaggagatggatcgtcgtttacgtgccttagaagagcgcaaaccgtcattgcgcgtgattttc

SEQ ID NO: 598 - protein, 468 aa, synthetic construct
  REGION 1..468: note = Variant of RNase inhibitor
MHHHHHHGGSGTMSLDIQCQQLSDARWTELLPLLQQSEVVRLDDCGLTESRCKDISSALQANPSLTELSLCTNELGDAGVTLVLQGLQSGTCKIEKLSLQNCCLTKTGCGVLGDMLRSMPTLRALYLNDNPLGDAGLQLLCQGLVDENCHLEKLQVEYCNLTAASCESLASALRAKRHFKELAVSNNELGEAGVRVLCRGLVESPCQLEVLKLENCGLTSASCEDLCRVVASKPSLQELDLGMNKLGDQGIATLCPTLLHPSCQIRVLWLWNCDITTAGCRDLCQVLRAKPSLKELSLAGNALGDEGARLLCESLLEPACQLESLWVKSCSFTAASCQHFSSMLTRNKCLVELQLSNNKLGDCGVQQLCQGLSQPGAALQVLWLGDCDVGHSGCLSLASVLLVNRSLRELDLSNNCMGEEGILRLMESVEQPGCVLEQLVLYDIYWSEEMDRRLRALEERKPSLRVIF

SEQ ID NO: 599 - DNA, 1404 bp, synthetic construct
  misc_feature 1..1404: note = Variant of RNase inhibitor
  source 1..1404: mol_type = other DNA
atgcaccatcatcatcatcatggcggtagcggcacgatgtctctggatattcagtgtcaacaattgtcagatgcgcgttggactgaactgttaccgcttctgcaacagtcggaagtggtgcgcctggatgactgcggcctcactgagagtcgctgcaaagacatcagtagtgcactgaaagccaacccacgtttgaccgaattaagcctgtgtacaaatgagctgggtgatgctggagttaccttagtcctgcagggcttgcagtctggcacgtgcaagattgaaaaactgtccctccagaactgttgtctgacgaagactggttgcggtgtattaggcgacatgcttcgttcaatgcccaccctgcgcgcactgtatctgaatgataacccgttgggcgatgcgggcctccagctgctttgcagtgggctggtggacgaaaattgtcacctggagaaactgcaggtggaatactgcaatctcacagcagcctcgtgcgaaagcttggcgagcgctctgcgtgccaaaacgcattttaaagaattagcggtttcgaacaacgaactgggtgaagcaggcgtgcgcgtactttgtcgtgggctggtggagagtccatgccaactggaggttctgaaactggaaaattgtggattgacctctgcctcctgcgaggatctttgtcgtgtggtcgctagcaaaccaagcctccaggaattggaccttggcatgaacaaattaggtgaccaaggcatcgcaacgttatgcccgaccctgcttcacccttcatgccagattcgtgttttgtggctctggaactgtgatatcaccaccgccggctgccgcgacctctgtcaggtattacgcgcgaagtcgtccctcaaagagctgagtcttgcgggtaatgccttgggagatgaaggcgcacgtctcttgtgcgaatcgttattagaaccggcctgccagctcgaaagcctttgggtgaaaagctgttctttcactgctgcttcatgccagcattttagttcgatgttgacgcgcaacaagtgtcttgttgagctccaattgagcaataataaattaggtgattgtggcgtgcagcagctttgccaagggttatctcaaccaggtgcggccctccaggttttgtggttgggcgactgtgatgtaggtcatagtggctgtctgagcttagcttccgtgttgcttgtcaaccgttccttacgcgaactcgaccttagtaacaactgcatgggcgaagaagggattctccgtttgatggagagcgttgaacaaccgggatgcgtgcttgaacagttggtcctctatgacatctactggtcggaggagatggatcgtcgtttacgtgccttagaagagcgcaaaccgtcattgcgcgtgattttc

SEQ ID NO: 600 - protein, 468 aa, synthetic construct
  REGION 1..468: note = Variant of RNase inhibitor
MHHHHHHGGSGTMSLDIQCQQLSDARWTELLPLLQQSEVVRLDDCGLTESRCKDISSALKANPRLTELSLCTNELGDAGVTLVLQGLQSGTCKIEKLSLQNCCLTKTGCGVLGDMLRSMPTLRALYLNDNPLGDAGLQLLCSGLVDENCHLEKLQVEYCNLTAASCESLASALRAKTHFKELAVSNNELGEAGVRVLCRGLVESPCQLEVLKLENCGLTSASCEDLCRVVASKPSLQELDLGMNKLGDQGIATLCPTLLHPSCQIRVLWLWNCDITTAGCRDLCQVLRAKSSLKELSLAGNALGDEGARLLCESLLEPACQLESLWVKSCSFTAASCQHFSSMLTRNKCLVELQLSNNKLGDCGVQQLCQGLSQPGAALQVLWLGDCDVGHSGCLSLASVLLVNRSLRELDLSNNCMGEEGILRLMESVEQPGCVLEQLVLYDIYWSEEMDRRLRALEERKPSLRVIF

SEQ ID NO: 601 - DNA, 1404 bp, synthetic construct
  misc_feature 1..1404: note = Variant of RNase inhibitor
  source 1..1404: mol_type = other DNA
atgcaccatcatcatcatcatggcggtagcggcacgatgtctctggatattcagtgtcaacaattgtcagatgcgcgttggactgaactgttaccgcttctgcaacagagcgaagtggtgcgcctggatgactgcggcctcactgagagtcgctgcaaagacatcagtagtgcactgcaagccaacccatcgttgatcgaattaagcctgtgtacaaatgagctgggtgatgctggagttaccttagtcctgcagggcttgcagtctggcacgtgcaagattgaaaaactgtccctccagaactgttgtctgacgaagactggttgcggtgtattaggcgacatgcttcgttcaatgcccaccctgcgcgcactgtatctgaatgataacccgttgggcgatgcgggcctccagctgctttgctccgggctggtggacgaaaattgtcacctggagaaactgcaggtggaatactgcaatctcacagcagcctcgtgcgaaagcttggcgagcgctctgcgtgccaaacgccattttaaagaattagcggtttcgaacaacgaactgggtgaagcaggcgtgcgcgtactttgtcgtgggctggtggagagtccatgccaactggaggttctgaaactggaaaattgtggattgacctctgcctcctgcgaggatctttgtcgtgtggtcgctagcaaaccaagcctccaggaattggaccttggcatgaacaaattaggtgaccaaggcatcgcaacgttatgcccgaccctgcttcacccttcatgccagattcgtgttttgtggctctggaactgtgatatcaccaccgccggctgccgcgacctctgtcaggtattacgcgcgaagccgtccctcaaagagctgagtcttgcgggtaatgccttgggagatgaaggcgcacgtctcttgtgcgaatcgttattagaaccgggctgccagctcgaaagcctttgggtgaaaagctgttctttcactgctgcttcatgccagcattttagttcgatgttgacgcgcaacaagtgtcttgttgagctccaattgagcaataataaattaggtgattgtggcgtgcagcagctttgccaagggttatctcaaccaggtgcggccctccaggttttgtggttgggcgactgtgatgtaggtcatagtggctgtgcaagcttagcttccgtgttgcttgtcaaccgttccttacgcgaactcgaccttagtaacaactgcatgggcgaagaagggattctccgtttgatggagagcgttgaacaaccgggatgcgtgcttgaacagttggtcctctatgacatctactggtcggaggagatggatcgtcgtttacgtgccttagaagagcgcaaaccgtcattgcgcgtgattttc

SEQ ID NO: 602 - protein, 468 aa, synthetic construct
  REGION 1..468: note = Variant of RNase inhibitor
MHHHHHHGGSGTMSLDIQCQQLSDARWTELLPLLQQSEVVRLDDCGLTESRCKDISSALQANPSLIELSLCTNELGDAGVTLVLQGLQSGTCKIEKLSLQNCCLTKTGCGVLGDMLRSMPTLRALYLNDNPLGDAGLQLLCSGLVDENCHLEKLQVEYCNLTAASCESLASALRAKRHFKELAVSNNELGEAGVRVLCRGLVESPCQLEVLKLENCGLTSASCEDLCRVVASKPSLQELDLGMNKLGDQGIATLCPTLLHPSCQIRVLWLWNCDITTAGCRDLCQVLRAKPSLKELSLAGNALGDEGARLLCESLLEPGCQLESLWVKSCSFTAASCQHFSSMLTRNKCLVELQLSNNKLGDCGVQQLCQGLSQPGAALQVLWLGDCDVGHSGCASLASVLLVNRSLRELDLSNNCMGEEGILRLMESVEQPGCVLEQLVLYDIYWSEEMDRRLRALEERKPSLRVIF

SEQ ID NO: 603 - DNA, 1404 bp, synthetic construct
  misc_feature 1..1404: note = Variant of RNase inhibitor
  source 1..1404: mol_type = other DNA
atgcaccatcatcatcatcatggcggtagcggcacgatgtctctggatattcagtgtcaacaattgtcagatgcgcgttggactgaactgttaccgcttctgcaacagagcgaagtggtgcgcctggatgactgcggcctcactgagagtcgctgcaaagacatcagtagtgcactgcaagccaacccacgtttgaccgaattaagcctgtgtacaaatgagctgggtgatgctggagttaccttagtcctgcagggcttgcagtctggcacgtgcaagattgaaaaactgtccctccagaactgttgtctgacgaaggatggttgcggtgtattaggcgacatgcttcgttcaatgcccaccctgcgcgcactgtatctgaatgataacccgttgggcgatgcgggcctccagctgctttgctccgggctggtggacgaaaattgtcacctggagaaactgcaggtggaatactgcaatctcacagcagcctcgtgcgaaagcttggcgagcgctctgcgtgccaaaacgcattttaaagaattagcggtttcgaacaacgaactgggtgaagcaggcgtgcgcgtactttgtcgtgggctggtggagagtccatgccaactggaggttctgaaactggaaaattgtggattgacctctgcctcctgcgaggatctttgtctggtggtcgctagcaaaccaagcctccaggaattggaccttggcatgaacaaattaggtgaccaaggcatcgcaacgttatgcccgaccctgcttcacccttcatgccagattcgtgttttgtggctctggaactgtgatatcaccaccgccggctgccgcgacctctgtcaggtattacgcgcgaagtcgtccctcaaagagctgagtcttgcgggtaatgccttgggagatgaaggcgcacgtctcttgtgcgaatcgttattaagtccggcctgccagctcgaaagcctttgggtgaaaagctgttctttcactgctgcttcatgccagcattttagttcgatgttgacgcgcaacaagtgtcttgttgagctccaattgagcaataataaattaggtgattgtggcgtgcagcagctttgccaagggttatctcaaccaggtgcggccctccaggttttgtggttgggcgactgtgatgtaggtcatagtggctgtctgagcttagcttccgtgttgcttgtcaaccgttccttacgcgaactcgaccttagtaacaactgcatgggcgaagaagggattctccgtttgatggagagcgttgaacaaccgggatgcgtgcttgaacagttggtcctctatgacatctactggtcggaggagatggatcgtcgtttacgtgccttagaagagcgcaaaccgtcattgcgcgtgattttc

SEQ ID NO: 604 - protein, 468 aa, synthetic construct
  REGION 1..468: note = Variant of RNase inhibitor
MHHHHHHGGSGTMSLDIQCQQLSDARWTELLPLLQQSEVVRLDDCGLTESRCKDISSALQANPRLTELSLCTNELGDAGVTLVLQGLQSGTCKIEKLSLQNCCLTKDGCGVLGDMLRSMPTLRALYLNDNPLGDAGLQLLCSGLVDENCHLEKLQVEYCNLTAASCESLASALRAKTHFKELAVSNNELGEAGVRVLCRGLVESPCQLEVLKLENCGLTSASCEDLCLVVASKPSLQELDLGMNKLGDQGIATLCPTLLHPSCQIRVLWLWNCDITTAGCRDLCQVLRAKSSLKELSLAGNALGDEGARLLCESLLSPACQLESLWVKSCSFTAASCQHFSSMLTRNKCLVELQLSNNKLGDCGVQQLCQGLSQPGAALQVLWLGDCDVGHSGCLSLASVLLVNRSLRELDLSNNCMGEEGILRLMESVEQPGCVLEQLVLYDIYWSEEMDRRLRALEERKPSLRVIF

SEQ ID NO: 605 - DNA, 1404 bp, synthetic construct
  misc_feature 1..1404: note = Variant of RNase inhibitor
  source 1..1404: mol_type = other DNA
atgcaccatcatcatcatcatggcggtagcggcacgatgtctctggatattcagtgtcaacaattgtcagatgcgcgttggactgaactgttaccgcttctgcaacagagcgaagtggtgcgcctggatgactgcggcctcactgagagtcgctgcaaagacatcagtagtgcactgcaagccaacccatcgttgaccgaattaagcctgtgtacaaatgagctgggtgatgctggagttaccttagtcctgcagggcttgcagtctggcacgtgcaagattgaaaaactgtccctccagaactgttgtctgacgaagactggttgcggtgtattaggcgacatgcttcgttcaatgcccaccctgcgcgcactgtatctgaatgataacccgttgggcgatgcgggcctccagctgctttgctccgggctggtggacgaaaattgtcacctggagaaactgcaggtggaatactgcaatctcacagcagcctcgtgcgaaagcttggcgagcgctctgcgtgccaaacgccattttaaagaattagcggtttcgaacaacgaactgggtgaagcaggcgtgcgcgtactttgtcgtgggctggtggagagtccatgccaactggaggttctgaaactggaaaattgtggattgacctctgcctcctgcgaggatctttgtcgtgtggtcgctagcaaaccaagcctccaggaattggaccttggcatgaacaaattaggtgaccaaggcatcgcaacgttatgcccgaccctgcttcacccttcatgccagattcgtgttttgtggctctggaactgtgatatcaccaccgccggctgccgcgacctctgtcaggtattacgcgcgaagccgtccctcaaagagctgagtcttgcgggtaatgccttgggagatgaaggcgcacgtctcttgtgcgaatcgttattagaaccggcctgccagctcgaaagcctttgggtgaaaagctgttctttcactgctgcttcatgccagcattttagtatgatgttgacgcgcaacaagtgtcttgttgagctccaattgagcaataataaattaggtgattgtggcgtgcagcagctttgccaagggttatctcaaccaggtgcggccctccaggttttgtggttgggcgactgtgatgtaggtcatagtggctgtctgagcttagcttccgtgttgcttgtcaaccgttccttacgcgaactcgaccttagtaacaactgcatgggcgaagaagggattctccgtttgatggagagcgttgaacaaccgggatgcgtgcttgaacagttggtcctctatgacatctactggtcggaggagatggatcgtcgtttacgtgccttagaagagcgcaaaccgtcattgcgcgtgattttc

SEQ ID NO: 606 - protein, 468 aa, synthetic construct
  REGION 1..468: note = Variant of RNase inhibitor
MHHHHHHGGSGTMSLDIQCQQLSDARWTELLPLLQQSEVVRLDDCGLTESRCKDISSALQANPSLTELSLCTNELGDAGVTLVLQGLQSGTCKIEKLSLQNCCLTKTGCGVLGDMLRSMPTLRALYLNDNPLGDAGLQLLCSGLVDENCHLEKLQVEYCNLTAASCESLASALRAKRHFKELAVSNNELGEAGVRVLCRGLVESPCQLEVLKLENCGLTSASCEDLCRVVASKPSLQELDLGMNKLGDQGIATLCPTLLHPSCQIRVLWLWNCDITTAGCRDLCQVLRAKPSLKELSLAGNALGDEGARLLCESLLEPACQLESLWVKSCSFTAASCQHFSMMLTRNKCLVELQLSNNKLGDCGVQQLCQGLSQPGAALQVLWLGDCDVGHSGCLSLASVLLVNRSLRELDLSNNCMGEEGILRLMESVEQPGCVLEQLVLYDIYWSEEMDRRLRALEERKPSLRVIF

SEQ ID NO: 607 - DNA, 1404 bp, synthetic construct
  misc_feature 1..1404: note = Variant of RNase inhibitor
  source 1..1404: mol_type = other DNA
atgcaccatcatcatcatcatggcggtagcggcacgatgtctctggatattcagtgtcaacaattgtcagatgcgcgttggactgaactgttaccgcttctgcaacagtcggaagtggtgcgcctggatgactgcggcctcactgagagtcgctgcaaagacatcagtagtgcactgcaagccaacccacgtttgaccgaattaagcctgtgtacaaatgagctgggtgatgctggagttaccttagtcctgcagggcttgcagtctggcacgtgcaagattgaaaaactgtccctccagaactgttgtctgacgaagaccggttgcggtgtattaggcgacatgcttcgttcaatgcccaccctgcgcgcactgtatctgaatgataacccgttgggcgatgcgggcctccagctgctttgccaggggctggtggacgaaaattgtcacctggagaaactgcaggtggaatactgcaatctcacagcagcctcgtgcgaaagcttggcgagcgctctgcgtgccaaaacgcattttaaagaattagcggtttcgaacaacgaactgggtgaagcaggcgtgcgcgtactttgtcgtgggctggtggagagtccatgccaactggaggttctgaaactggaaaattgtggattgacctctgcctcctgcgaggatctttgtctggtggtcgctagcaaaccaagcctccaggaattggaccttggcatgaacaaattaggtgaccaaggcatcgcaacgttatgcccgaccctgcttcacccttcatgccagattcgtgttttgtggctctggaactgtgatatcaccaccgccggctgccgcgacctctgtcaggtattacgcgcgaagccgtccctcaaagagctgagtcttgcgggtaatgccttgggagatgaaggcgcacgtctcttgtgcgaatcgttattaagtccggcctgccagctcgaaagcctttgggtgaaaagctgttctttcactgctgcttcatgccagcattttagttcgatgttgacgcgcaacaagtgtcttgttgagctccaattgagcaataataaattaggtgattgtggcgtgcagcagctttgccaagggttatctcaaccaggtgcggccctccaggttttgtggttgggcgactgtgatgtaggtcatagtggctgtgctagcttagcttccgtgttgcttgtcaaccgttccttacgcgaactcgaccttagtaacaactgcatgggcgaagaagggattctccgtttgatggagagcgttgaacaaccgggatgcgtgcttgaacagttggtcctctatgacatctactggtcggaggagatggatcgtcgtttacgtgccttagaagagcgcaaaccgtcattgcgcgtgattttc

SEQ ID NO: 608 - protein, 468 aa, synthetic construct
  REGION 1..468: note = Variant of RNase inhibitor
MHHHHHHGGSGTMSLDIQCQQLSDARWTELLPLLQQSEVVRLDDCGLTESRCKDISSALQANPRLTELSLCTNELGDAGVTLVLQGLQSGTCKIEKLSLQNCCLTKTGCGVLGDMLRSMPTLRALYLNDNPLGDAGLQLLCQGLVDENCHLEKLQVEYCNLTAASCESLASALRAKTHFKELAVSNNELGEAGVRVLCRGLVESPCQLEVLKLENCGLTSASCEDLCLVVASKPSLQELDLGMNKLGDQGIATLCPTLLHPSCQIRVLWLWNCDITTAGCRDLCQVLRAKPSLKELSLAGNALGDEGARLLCESLLSPACQLESLWVKSCSFTAASCQHFSSMLTRNKCLVELQLSNNKLGDCGVQQLCQGLSQPGAALQVLWLGDCDVGHSGCASLASVLLVNRSLRELDLSNNCMGEEGILRLMESVEQPGCVLEQLVLYDIYWSEEMDRRLRALEERKPSLRVIF

SEQ ID NO: 609 - DNA, 1404 bp, synthetic construct
  misc_feature 1..1404: note = Variant of RNase inhibitor
  source 1..1404: mol_type = other DNA
atgcaccatcatcatcatcatggcggtagcggcacgatgtctctggatattcagtgtcaacaattgtcagatgcgcgttggactgaactgttaccgcttctgcaacagtgtgaagtggtgcgcctggatgactgcggcctcactgagagtcgctgcaaagacatcagtagtgcactgcaagccaacccatcgttgaccgaattaagcctgtgtacaaatgagctgggtgatgctggagttaccttagtcctgcagggcttgcagtctggcacgtgcaagattgaaaaactgtccctccagaactgttgtctgacgaagactggttgcggtgtattaggcgacatgcttcgttcaatgcccaccctgcgcgcactgtatctgaatgataacccgttgggcgatgcgggcctccagctgctttgctccgggctggtggacgaaaattgtcacctggagaaactgcaggtggaatactgcaatctcacagcagcctcgtgcgaaagcttggcgagcgctctgcgtgccaaacgccattttaaagaattagcggtttcgaacaacgaactgggtgaagcaggcgtgcgcgtactttgtcgtgggctggtggagagtccatgccaactggaggttctgaaactggaaaattgtggattgacctctgcctcctgcgaggatctttgtcgtgtggtcgctagcaaaccaagcctccaggaattggaccttggcatgaacaaattaggtgaccaaggcatcgcaacgttatgcccgaccctgcttcacccttcatgccagattcgtgttttgtggctctggaactgtgatatcaccaccgccggctgccgcgacctctgtcaggtattacgcgcgaagccgtccctcaaagagctgagtcttgcgggtaatgccttgggagatgaaggcgcacgtctcttgtgcgaatcgttattagaaccggcctgccagctcgaaagcctttgggtgaaaagctgttctttcactgctgcttcatgccagcattttagttcgatgttgacgcgcaacaagtgtcttgttgagctccaattgagcaataataaattaggtgattgtggcgtgcagcagctttgccaagggttatctcaaccaggtgcggccctccaggttttgtggttgggcgactgtgatgtaggtcatagtggctgtgcaagcttagcttccgtgttgcttgtcaaccgttccttacgcgaactcgaccttagtaacaactgcatgggcgaagaagggattctccgtttgatggagagcgttgaacaaccgggatgcgtgcttgaacagttggtcctctatgacatctactggtcggaggagatggatcgtcgtttacgtgccttagaagagcgcaaaccgtcattgcgcgtgattttc

SEQ ID NO: 610 - protein, 468 aa, synthetic construct
  REGION 1..468: note = Variant of RNase inhibitor
MHHHHHHGGSGTMSLDIQCQQLSDARWTELLPLLQQCEVVRLDDCGLTESRCKDISSALQANPSLTELSLCTNELGDAGVTLVLQGLQSGTCKIEKLSLQNCCLTKTGCGVLGDMLRSMPTLRALYLNDNPLGDAGLQLLCSGLVDENCHLEKLQVEYCNLTAASCESLASALRAKRHFKELAVSNNELGEAGVRVLCRGLVESPCQLEVLKLENCGLTSASCEDLCRVVASKPSLQELDLGMNKLGDQGIATLCPTLLHPSCQIRVLWLWNCDITTAGCRDLCQVLRAKPSLKELSLAGNALGDEGARLLCESLLEPACQLESLWVKSCSFTAASCQHFSSMLTRNKCLVELQLSNNKLGDCGVQQLCQGLSQPGAALQVLWLGDCDVGHSGCASLASVLLVNRSLRELDLSNNCMGEEGILRLMESVEQPGCVLEQLVLYDIYWSEEMDRRLRALEERKPSLRVIF

SEQ ID NO: 611 - DNA, 1404 bp, synthetic construct
  misc_feature 1..1404: note = Variant of RNase inhibitor
  source 1..1404: mol_type = other DNA
atgcaccatcatcatcatcatggcggtagcggcacgatgtctctggatattcagtgtcaacaattgtcagatgcgcgttggactgaactgttaccgcttctgcaacagagcgaagtggtgcgcctggatgactgcggcctcactgagagtcgctgcaaagacatcagtagtgcactgcaagccaacccatcgttgaccgaattaagcctgtgtacaaatgagctgggtgatgctggagttaccttagtcctgcagggcttgcagtctggcacgtgcaagattgaaaaactgtccctccagaactgttgtctgacgaagactggttgcggtgtattaggcgacatgcttcgttcaatgcccaccctgcgcgcactgtatctgaatgataacccgttgggcgatgcgggcctccagctgctttgctccgggctggtggacgaaaattgtcacctggagaaactgcaggtggaatactgcaatctcacagcagcctcgtgcgaaagcttggcgagcgctctgcgtgccaaacgccattttaaagaattagcggtttcgaacaacgaactgggtgaagcaggcgtgcgcgtactttgtcgtgggctggtggagagtccatgccaactggaggttctgaaactggaaaattgtggattgacctctgcctcctgcgaggatctttgtcgtgtggtcgctagcaaaccaagcctccaggaattggaccttggcatgaacaaattaggtgaccaaggcatcgcaacgttatgcccgaccctgcttctgccttcatgccagattcgtgttttgtggctctggaactgtgatatcaccaccgccggctgccgcgacctctgtcaggtattacgcgcgaagccgtccctcaaagagctgagtcttgcgggtaatgccttgggagatgaaggcgcacgtctcttgtgcgaatcgttattagaaccggcctgccagctcgaaagcctttgggtgaaaagctgttctttcactgctgcttcatgccagcattttagttcgatgttgacgcgcaacaagtgtcttgttgagctccaattgagcaataataaattaggtgattgtggcgtgcagcagctttgccaagggttatctcaaccaggtgcggccctccaggttttgtggttgggcgactgtgatgtaggtcatagtggctgtgcaagcttagcttccgtgttgcttgtcaaccgttccttacgcgaactcgaccttagtaacaactgcatgggcgaagaagggattctccgtttgatggagagcgttgaacaaccgggatgcgtgcttgaacagttggtcctctatgacatctactggtcggaggagatggatcgtcgtttacgtgccttagaagagcgcaaaccgtcattgcgcgtgattttc

SEQ ID NO: 612 - protein, 468 aa, synthetic construct
  REGION 1..468: note = Variant of RNase inhibitor
MHHHHHHGGSGTMSLDIQCQQLSDARWTELLPLLQQSEVVRLDDCGLTESRCKDISSALQANPSLTELSLCTNELGDAGVTLVLQGLQSGTCKIEKLSLQNCCLTKTGCGVLGDMLRSMPTLRALYLNDNPLGDAGLQLLCSGLVDENCHLEKLQVEYCNLTAASCESLASALRAKRHFKELAVSNNELGEAGVRVLCRGLVESPCQLEVLKLENCGLTSASCEDLCRVVASKPSLQELDLGMNKLGDQGIATLCPTLLLPSCQIRVLWLWNCDITTAGCRDLCQVLRAKPSLKELSLAGNALGDEGARLLCESLLEPACQLESLWVKSCSFTAASCQHFSSMLTRNKCLVELQLSNNKLGDCGVQQLCQGLSQPGAALQVLWLGDCDVGHSGCASLASVLLVNRSLRELDLSNNCMGEEGILRLMESVEQPGCVLEQLVLYDIYWSEEMDRRLRALEERKPSLRVIF

SEQ ID NO: 613 - DNA, 1404 bp, synthetic construct
  misc_feature 1..1404: note = Variant of RNase inhibitor
  source 1..1404: mol_type = other DNA
atgcaccatcatcatcatcatggcggtagcggcacgatgtctctggatattcagtgtcaacaattgtcagatgcgcgttggactgaactgttaccgcttctgcaacagtcggaagtggtgcgcctggatgactgcggcctcactgagagtcgctgcaaagacatcagtagtgcactgaaagccaacccaagtttgaccgaattaagcctgtgtacaaatgagctgggtgatgctggagttaccttagtcctgcagggcttgcagtctggcacgtgcaagattgaaaaactgtccctccagaactgttgtctgacgaagaccggttgcggtgtattaggcgacatgcttcgttcaatgcccaccctgcgcgcactgtatctgaatgataacccgttgggcgatgcgggcctccagctgctttgcagtgggctggtggacgaaaattgtcacctggagaaactgcaggtggaatactgcaatctcacagcagcctcgtgcgaaagcttggcgagcgctctgcgtgccaaacgtcattttaaagaattagcggtttcgaacaacgaactgggtgaagcaggcgtgcgcgtactttgtcgtgggctggtggagagtccatgccaactggaggttctgaaactggaaaattgtggattgacctctgcctcctgcgaggatctttgtctggtggtcgctagcaaaccaagcctccaggaattggaccttggcatgaacaaattaggtgaccaaggcatcgcaacgttatgcccgaccctgcttcacccttcatgccagattcgtgttttgtggctctggaactgtgatatcaccaccgccggctgccgcgacctctgtcaggtattacgcgcgaagccgtccctcaaagagctgagtcttgcgggtaatgccttgggagatgaaggcgcacgtctcttgtgcgaatcgttattaagtccggcctgccagctcgaaagcctttgggtgaaaagctgttctttcactgctgcttcatgccagcattttagttcgatgttgacgcgcaacaagtgtcttgttgagctccaattgagcaataataaattaggtgattgtggcgtgcagcagctttgccaagggttatctcaaccaggtgcggccctccaggttttgtggttgggcgactgtgatgtaggtcatagtggctgtctgagcttagcttccgtgttgcttgtcaaccgttccttacgcgaactcgaccttagtaacaactgcatgggcgaagaagggattctccgtttgatggagagcgttgaacaaccgggatgcgtgcttgaacagttggtcctctatgacatctactggtcggaggagatggatcgtcgtttacgtgccttagaagagcgcaaaccgtcattgcgcgtgattttc

SEQ ID NO: 614 - protein, 468 aa, synthetic construct
  REGION 1..468: note = Variant of RNase inhibitor
MHHHHHHGGSGTMSLDIQCQQLSDARWTELLPLLQQSEVVRLDDCGLTESRCKDISSALKANPSLTELSLCTNELGDAGVTLVLQGLQSGTCKIEKLSLQNCCLTKTGCGVLGDMLRSMPTLRALYLNDNPLGDAGLQLLCSGLVDENCHLEKLQVEYCNLTAASCESLASALRAKRHFKELAVSNNELGEAGVRVLCRGLVESPCQLEVLKLENCGLTSASCEDLCLVVASKPSLQELDLGMNKLGDQGIATLCPTLLHPSCQIRVLWLWNCDITTAGCRDLCQVLRAKPSLKELSLAGNALGDEGARLLCESLLSPACQLESLWVKSCSFTAASCQHFSSMLTRNKCLVELQLSNNKLGDCGVQQLCQGLSQPGAALQVLWLGDCDVGHSGCLSLASVLLVNRSLRELDLSNNCMGEEGILRLMESVEQPGCVLEQLVLYDIYWSEEMDRRLRALEERKPSLRVIF

SEQ ID NO: 615 - DNA, 1404 bp, synthetic construct
  misc_feature 1..1404: note = Variant of RNase inhibitor
  source 1..1404: mol_type = other DNA
atgcaccatcatcatcatcatggcggtagcggcacgatgtctctggatattcagtgtcaacaattgtcagatgcgcgttggactgaactgttaccgcttctgcaacagtcggaagtggtgcgcctggatgactgcggcctcactgagagtcgctgcaaagacatcagtagtgcactgaaagccaacccacgtttgaccgaattaagcctgtgtacaaatgagctgggtgatgctggagttaccttagtcctgcagggcttgcagtctggcacgtgcaagattgaaaaactgtccctccagaactgttgtctgacgaagactggttgcggtgtattaggcgacatgcttcgttcaatgcccaccctgcgcgcactgtatctgaatgataacccgttgggcgatgcgggcctccagctgctttgcagtgggctggtggacgaaaattgtcacctggagaaactgcaggtggaatactgcaatctcacagcagcctcgtgcgaaagcttggcgagcgctctgcgtgcctcgcgccattttaaagaattagcggtttcgaacaacgaactgggtgaagcaggcgtgcgcgtactttgtcgtgggctggtggagagtccatgccaactggaggttctgaaactggaaaattgtggattgacctctgcctcctgcgaggatctttgtcgtgtggtcgctagcaaaccaagcctccaggaattggaccttggcatgaacaaattaggtgaccaaggcatcgcaacgttatgcccgaccctgcttcacccttcatgccagattcgtgttttgtggctctggaactgtgatatcaccaccgccggctgccgcgacctctgtcaggtattacgcgcgaagccgtccctcaaagagctgagtcttgcgggtaatgccttgggagatgaaggcgcacgtctcttgtgcgaatcgttattaagtccggcctgccagctcgaaagcctttgggtgaaaagctgttctttcactgctgcttcatgccagcattttagtatgatgttgacgcgcaacaagtgtcttgttgagctccaattgagcaataataaattaggtgattgtggcgtgcagcagctttgccaagggttatctcaaccaggtgcggccctccaggttttgtggttgggcgactgtgatgtaggtcatagtggctgtgcaagcttagcttccgtgttgcttgtcaaccgttccttacgcgaactcgaccttagtaacaactgcatgggcgaagaagggattctccgtttgatggagagcgttgaacaaccgggatgcgtgcttgaacagttggtcctctatgacatctactggtcggaggagatggatcgtcgtttacgtgccttagaagagcgcaaaccgtcattgcgcgtgattttc

SEQ ID NO: 616 - protein, 468 aa, synthetic construct
  REGION 1..468: note = Variant of RNase inhibitor
MHHHHHHGGSGTMSLDIQCQQLSDARWTELLPLLQQSEVVRLDDCGLTESRCKDISSALKANPRLTELSLCTNELGDAGVTLVLQGLQSGTCKIEKLSLQNCCLTKTGCGVLGDMLRSMPTLRALYLNDNPLGDAGLQLLCSGLVDENCHLEKLQVEYCNLTAASCESLASALRASRHFKELAVSNNELGEAGVRVLCRGLVESPCQLEVLKLENCGLTSASCEDLCRVVASKPSLQELDLGMNKLGDQGIATLCPTLLHPSCQIRVLWLWNCDITTAGCRDLCQVLRAKPSLKELSLAGNALGDEGARLLCESLLSPACQLESLWVKSCSFTAASCQHFSMMLTRNKCLVELQLSNNKLGDCGVQQLCQGLSQPGAALQVLWLGDCDVGHSGCASLASVLLVNRSLRELDLSNNCMGEEGILRLMESVEQPGCVLEQLVLYDIYWSEEMDRRLRALEERKPSLRVIF

SEQ ID NO: 617 - DNA, 1404 bp, synthetic construct
  misc_feature 1..1404: note = Variant of RNase inhibitor
  source 1..1404: mol_type = other DNA
atgcaccatcatcatcatcatggcggtagcggcacgatgtctctggatattcagtgtcaacaattgtcagatgcgcgttggactgaactgttaccgcttctgcaacagtcggaagtggtgcgcctggatgactgcggcctcactgagagtcgctgcaaagacatcagtagtgcactgcaagccaacccaagtttgaccgaattaagcctgtgtacaaatgagctgggtgatgctggagttaccttagtcctgcagggcttgcagtctggcacgtgcaagattgaaaaactgtccctccagaactgttgtctgacgaagactggttgcggtgtattaggcgacatgcttcgttcaatgcccaccctgcgcgcactgtatctgaatgataacccgttgggcgatgcgggcctccagctgctttgctccgggctggtggacgaaaattgtcacctggagaaactgcaggtggaatactgcaatctcacagcagcctcgtgcgaaagcttggcgagcgctctgcgtgccaaaacgcattttaaagaattagcggtttcgaacaacgaactgggtgaagcaggcgtgcgcgtactttgtcgtgggctggtggagagtccatgccaactggaggttctgaaactggaaaattgtggattgacctctgcctcctgcgaggatctttgtctggtggtcgctagcaaaccaagcctccaggaattggaccttggcatgaacaaattaggtgaccaaggcatcgcaacgttatgcccgaccctgcttcacccttcatgccagattcgtgttttgtggctctggaactgtgatatcaccaccgccggctgccgcgacctctgtcaggtattacgcgcgaagccgtccctcaaagagctgagtcttgcgggtaatgccttgggagatgaaggcgcacgtctcttgtgcgaatcgttattagaaccggcctgccagctcgaaagcctttgggtgaaaagctgttctttcactgctgcttcatgccagcattttagtatgatgttgacgcgcaacaagtgtcttgttgagctccaattgagcaataataaattaggtgattgtggcgtgcagcagctttgccaagggttatctcaaccaggtgcggccctccaggttttgtggttgggcgactgtgatgtaggtcatagtggctgtctgagcttagcttccgtgttgcttgtcaaccgttccttacgcgaactcgaccttagtaacaactgcatgggcgaagaagggattctccgtttgatggagagcgttgaacaaccgggatgcgtgcttgaacagttggtcctctatgacatctactggtcggaggagatggatcgtcgtttacgtgccttagaagagcgcaaaccgtcattgcgcgtgattttc

SEQ ID NO: 618 - protein, 468 aa, synthetic construct
  REGION 1..468: note = Variant of RNase inhibitor
MHHHHHHGGSGTMSLDIQCQQLSDARWTELLPLLQQSEVVRLDDCGLTESRCKDISSALQANPSLTELSLCTNELGDAGVTLVLQGLQSGTCKIEKLSLQNCCLTKTGCGVLGDMLRSMPTLRALYLNDNPLGDAGLQLLCSGLVDENCHLEKLQVEYCNLTAASCESLASALRAKTHFKELAVSNNELGEAGVRVLCRGLVESPCQLEVLKLENCGLTSASCEDLCLVVASKPSLQELDLGMNKLGDQGIATLCPTLLHPSCQIRVLWLWNCDITTAGCRDLCQVLRAKPSLKELSLAGNALGDEGARLLCESLLEPACQLESLWVKSCSFTAASCQHFSMMLTRNKCLVELQLSNNKLGDCGVQQLCQGLSQPGAALQVLWLGDCDVGHSGCLSLASVLLVNRSLRELDLSNNCMGEEGILRLMESVEQPGCVLEQLVLYDIYWSEEMDRRLRALEERKPSLRVIF

SEQ ID NO: 619 - DNA, 1404 bp, synthetic construct
  misc_feature 1..1404: note = Variant of RNase inhibitor
  source 1..1404: mol_type = other DNA
atgcaccatcatcatcatcatggcggtagcggcacgatgtctctggatattcagtgtcaacaattgtcagatgcgcgttggactgaactgttaccgcttctgcaacagagcgaagtggtgcgcctggatgactgcggcctcactgagagtcgctgcaaagacatcagtagtgcactgcaagccaacccacgtttgaccgaattaagcctgtgtacaaatgagctgggtgatgctggagttaccttagtcctgcagggcttgcagtctggcacgtgcaagattgaaaaactgtccctccagaactgttgtctgacgaagaccggttgcggtgtattaggcgacatgcttcgttcaatgcccaccctgcgcgcactgtatctgaatgataacccgttgggcgatgcgggcctccagctgctttgccaggggctggtggacgaaaattgtcacctggagaaactgcaggtggaatactgcaatctcacagcagcctcgtgcgaaagcttggcgagcgctctgcgtgccaaaacgcattttaaagaattagcggtttcgaacaacgaactgggtgaagcaggcgtgcgcgtactttgtcgtgggctggtggagagtccatgccaactggaggttctgaaactggaaaattgtggattgacctctgcctcctgcgaggatctttgtcgtgtggtcgctagcaaaccaagcctccaggaattggaccttggcatgaacaaattaggtgaccaaggcatcgcaacgttatgcccgaccctgcttcacccttcatgccagattcgtgttttgtggctctggaactgtgatatcaccaccgccggctgccgcgacctctgtcaggtattacgcgcgaagccgtccctcaaagagctgagtcttgcgggtaatgccttgggagatgaaggcgcacgtctcttgtgcgaatcgttattaagtccgggctgccagctcgaaagcctttgggtgaaaagctgttctttcactgctgcttcatgccagcattttagttcgatgttgacgcgcaacaagtgtcttgttgagctccaattgagcaataataaattaggtgattgtggcgtgcagcagctttgccaagggttatctcaaccaggtgcggccctccaggttttgtggttgggcgactgtgatgtaggtcatagtggctgtgctagcttagcttccgtgttgcttgtcaaccgttccttacgcgaactcgaccttagtaacaactgcatgggcgaagaagggattctccgtttgatggagagcgttgaacaaccgggatgcgtgcttgaacagttggtcctctatgacatctactggtcggaggagatggatcgtcgtttacgtgccttagaagagcgcaaaccgtcattgcgcgtgattttc

SEQ ID NO: 620 - protein, 468 aa, synthetic construct
  REGION 1..468: note = Variant of RNase inhibitor
MHHHHHHGGSGTMSLDIQCQQLSDARWTELLPLLQQSEVVRLDDCGLTESRCKDISSALQANPRLTELSLCTNELGDAGVTLVLQGLQSGTCKIEKLSLQNCCLTKTGCGVLGDMLRSMPTLRALYLNDNPLGDAGLQLLCQGLVDENCHLEKLQVEYCNLTAASCESLASALRAKTHFKELAVSNNELGEAGVRVLCRGLVESPCQLEVLKLENCGLTSASCEDLCRVVASKPSLQELDLGMNKLGDQGIATLCPTLLHPSCQIRVLWLWNCDITTAGCRDLCQVLRAKPSLKELSLAGNALGDEGARLLCESLLSPGCQLESLWVKSCSFTAASCQHFSSMLTRNKCLVELQLSNNKLGDCGVQQLCQGLSQPGAALQVLWLGDCDVGHSGCASLASVLLVNRSLRELDLSNNCMGEEGILRLMESVEQPGCVLEQLVLYDIYWSEEMDRRLRALEERKPSLRVIF

SEQ ID NO: 621 - DNA, 1404 bp, synthetic construct
  misc_feature 1..1404: note = Variant of RNase inhibitor
  source 1..1404: mol_type = other DNA
atgcaccatcatcatcatcatggcggtagcggcacgatgtctctggatattcagtgtcaacaattgtcagatgcgcgttggactgaactgttaccgcttctgcaacagagcgaagtggtgcgcctggatgactgcggcctcactgagagtcgctgcaaagacatcagtagtgcactgaaagccaacccacgtttgaccgaattaagcctgtgtacaaatgagctgggtgatgctggagttaccttagtcctgcagggcttgcagtctggcacgtgcaagattgaaaaactgtccctccagaactgttgtctgacgaaggatggttgcggtgtattaggcgacatgcttcgttcaatgcccaccctgcgcgcactgtatctgaatgataacccgttgggcgatgcgggcctccagctgctttgcagtgggctggtggacgaaaattgtcacctggagaaactgcaggtggaatactgcaatctcacagcagcctcgtgcgaaagcttggcgagcgctctgcgtgccaaacgtcattttaaagaattagcggtttcgaacaacgaactgggtgaagcaggcgtgcgcgtactttgtcgtgggctggtggagagtccatgccaactggaggttctgaaactggaaaattgtggattgacctctgcctcctgcgaggatctttgtcgtgtggtcgctagcaaaccaagcctccaggaattggaccttggcatgaacaaattaggtgaccaaggcatcgcaacgttatgcccgaccctgcttcacccttcatgccagattcgtgttttgtggctctggaactgtgatatcaccaccgccggctgccgcgacctctgtcaggtattacgcgcgaagccgtccctcaaagagctgagtcttgcgggtaatgccttgggagatgaaggcgcacgtctcttgtgcgaatcgttattagaaccggcctgccagctcgaaagcctttgggtgaaaagctgttctttcactgctgcttcatgccagcattttagtatgatgttgacgcgcaacaagtgtcttgttgagctccaattgagcaataataaattaggtgattgtggcgtgcagcagctttgccaagggttatctcaaccaggtgcggccctccaggttttgtggttgggcgactgtgatgtaggtcatagtggctgtgcaagcttagcttccgtgttgcttgtcaaccgttccttacgcgaactcgaccttagtaacaactgcatgggcgaagaagggattctccgtttgatggagagcgttgaacaaccgggatgcgtgcttgaacagttggtcctctatgacatctactggtcggaggagatggatcgtcgtttacgtgccttagaagagcgcaaaccgtcattgcgcgtgattttc

SEQ ID NO: 622 - protein, 468 aa, synthetic construct
  REGION 1..468: note = Variant of RNase inhibitor
MHHHHHHGGSGTMSLDIQCQQLSDARWTELLPLLQQSEVVRLDDCGLTESRCKDISSALKANPRLTELSLCTNELGDAGVTLVLQGLQSGTCKIEKLSLQNCCLTKDGCGVLGDMLRSMPTLRALYLNDNPLGDAGLQLLCSGLVDENCHLEKLQVEYCNLTAASCESLASALRAKRHFKELAVSNNELGEAGVRVLCRGLVESPCQLEVLKLENCGLTSASCEDLCRVVASKPSLQELDLGMNKLGDQGIATLCPTLLHPSCQIRVLWLWNCDITTAGCRDLCQVLRAKPSLKELSLAGNALGDEGARLLCESLLEPACQLESLWVKSCSFTAASCQHFSMMLTRNKCLVELQLSNNKLGDCGVQQLCQGLSQPGAALQVLWLGDCDVGHSGCASLASVLLVNRSLRELDLSNNCMGEEGILRLMESVEQPGCVLEQLVLYDIYWSEEMDRRLRALEERKPSLRVIF

SEQ ID NO: 623 - DNA, 1404 bp, synthetic construct
  misc_feature 1..1404: note = Variant of RNase inhibitor
  source 1..1404: mol_type = other DNA
atgcaccatcatcatcatcatggcggtagcggcacgatgtctctggatattcagtgtcaacaattgtcagatgcgcgttggactgaactgttaccgcttctgcaacagtcggaagtggtgcgcctggatgactgcggcctcactgagagtcgctgcaaagacatcagtagtgcactgaaagccaacccaagtttgaccgaattaagcctgtgtacaaatgagctgggtgatgctggagttaccttagtcctgcagggcttgcagtctggcacgtgcaagattgaaaaactgtccctccagaactgttgtctgacgaaggatggttgcggtgtattaggcgacatgcttcgttcaatgcccaccctgcgcgcactgtatctgaatgataacccgttgggcgatgcgggcctccagctgctttgccaggggctggtggacgaaaattgtcacctggagaaactgcaggtggaatactgcaatctcacagcagcctcgtgcgaaagcttggcgagcgctctgcgtgccaaacgtcattttaaagaattagcggtttcgaacaacgaactgggtgaagcaggcgtgcgcgtactttgtcgtgggctggtggagagtccatgccaactggaggttctgaaactggaaaattgtggattgacctctgcctcctgcgaggatctttgtcgtgtggtcgctagcaaaccaagcctccaggaattggaccttggcatgaacaaattaggtgaccaaggcatcgcaacgttatgcccgaccctgcttcacccttcatgccagattcgtgttttgtggctctggaactgtgatatcaccaccgccggctgccgcgacctctgtcaggtattacgcgcgaagtcgtccctcaaagagctgagtcttgcgggtaatgccttgggagatgaaggcgcacgtctcttgtgcgaatcgttattaagtccggcctgccagctcgaaagcctttgggtgaaaagctgttctttcactgctgcttcatgccagcattttagtatgatgttgacgcgcaacaagtgtcttgttgagctccaattgagcaataataaattaggtgattgtggcgtgcagcagctttgccaagggttatctcaaccaggtgcggccctccaggttttgtggttgggcgactgtgatgtaggtcatagtggctgtctgagcttagcttccgtgttgcttgtcaaccgttccttacgcgaactcgaccttagtaacaactgcatgggcgaagaagggattctccgtttgatggagagcgttgaacaaccgggatgcgtgcttgaacagttggtcctctatgacatctactggtcggaggagatggatcgtcgtttacgtgccttagaagagcgcaaaccgtcattgcgcgtgattttc

SEQ ID NO: 624 - protein, 468 aa, synthetic construct
  REGION 1..468: note = Variant of RNase inhibitor
MHHHHHHGGSGTMSLDIQCQQLSDARWTELLPLLQQSEVVRLDDCGLTESRCKDISSALKANPSLTELSLCTNELGDAGVTLVLQGLQSGTCKIEKLSLQNCCLTKDGCGVLGDMLRSMPTLRALYLNDNPLGDAGLQLLCQGLVDENCHLEKLQVEYCNLTAASCESLASALRAKRHFKELAVSNNELGEAGVRVLCRGLVESPCQLEVLKLENCGLTSASCEDLCRVVASKPSLQELDLGMNKLGDQGIATLCPTLLHPSCQIRVLWLWNCDITTAGCRDLCQVLRAKSSLKELSLAGNALGDEGARLLCESLLSPACQLESLWVKSCSFTAASCQHFSMMLTRNKCLVELQLSNNKLGDCGVQQLCQGLSQPGAALQVLWLGDCDVGHSGCLSLASVLLVNRSLRELDLSNNCMGEEGILRLMESVEQPGCVLEQLVLYDIYWSEEMDRRLRALEERKPSLRVIF

SEQ ID NO: 625 - DNA, 1404 bp, synthetic construct
  misc_feature 1..1404: note = Variant of RNase inhibitor
  source 1..1404: mol_type = other DNA
atgcaccatcatcatcatcatggcggtagcggcacgatgtctctggatattcagtgtcaacaattgtcagatgcgcgttggactgaactgttaccgcttctgcaacagtcggaagtggtgcgcctggatgactgcggcctcactgagagtcgctgcaaagacatcagtagtgcactgcaagccaacccatcgttgatcgaattaagcctgtgtacaaatgagctgggtgatgctggagttaccttagtcctgcagggcttgcagtctggcacgtgcaagattgaaaaactgtccctccagaactgttgtctgacgaagaccggttgcggtgtattaggcgacatgcttcgttcaatgcccaccctgcgcgcactgtatctgaatgataacccgttgggcgatgcgggcctccagctgctttgctccgggctggtggacgaaaattgtcacctggagaaactgcaggtggaatactgcaatctcacagcagcctcgtgcgaaagcttggcgagcgctctgcgtgccaaacgtcattttaaagaattagcggtttcgaacaacgaactgggtgaagcaggcgtgcgcgtactttgtcgtgggctggtggagagtccatgccaactggaggttctgaaactggaaaattgtggattgacctctgcctcctgcgaggatctttgtctggtggtcgctagcaaaccaagcctccaggaattggaccttggcatgaacaaattaggtgaccaaggcatcgcaacgttatgcccgaccctgcttcacccttcatgccagattcgtgttttgtggctctggaactgtgatatcaccaccgccggctgccgcgacctctgtcaggtattacgcgcgaagccgtccctcaaagagctgagtcttgcgggtaatgccttgggagatgaaggcgcacgtctcttgtgcgaatcgttattagaaccgggctgccagctcgaaagcctttgggtgaaaagctgttctttcactgctgcttcatgccagcattttagttcgatgttgacgcgcaacaagtgtcttgttgagctccaattgagcaataataaattaggtgattgtggcgtgcagcagctttgccaagggttatctcaaccaggtgcggccctccaggttttgtggttgggcgactgtgatgtaggtcatagtggctgtgctagcttagcttccgtgttgcttgtcaaccgttccttacgcgaactcgaccttagtaacaactgcatgggcgaagaagggattctccgtttgatggagagcgttgaacaaccgggatgcgtgcttgaacagttggtcctctatgacatctactggtcggaggagatggatcgtcgtttacgtgccttagaagagcgcaaaccgtcattgcgcgtgattttc

SEQ ID NO: 626 - protein, 468 aa, synthetic construct
  REGION 1..468: note = Variant of RNase inhibitor
MHHHHHHGGSGTMSLDIQCQQLSDARWTELLPLLQQSEVVRLDDCGLTESRCKDISSALQANPSLIELSLCTNELGDAGVTLVLQGLQSGTCKIEKLSLQNCCLTKTGCGVLGDMLRSMPTLRALYLNDNPLGDAGLQLLCSGLVDENCHLEKLQVEYCNLTAASCESLASALRAKRHFKELAVSNNELGEAGVRVLCRGLVESPCQLEVLKLENCGLTSASCEDLCLVVASKPSLQELDLGMNKLGDQGIATLCPTLLHPSCQIRVLWLWNCDITTAGCRDLCQVLRAKPSLKELSLAGNALGDEGARLLCESLLEPGCQLESLWVKSCSFTAASCQHFSSMLTRNKCLVELQLSNNKLGDCGVQQLCQGLSQPGAALQVLWLGDCDVGHSGCASLASVLLVNRSLRELDLSNNCMGEEGILRLMESVEQPGCVLEQLVLYDIYWSEEMDRRLRALEERKPSLRVIF

SEQ ID NO: 627 - DNA, 1404 bp, synthetic construct
  misc_feature 1..1404: note = Variant of RNase inhibitor
  source 1..1404: mol_type = other DNA
atgcaccatcatcatcatcatggcggtagcggcacgatgtctctggatattcagtgtcaacaattgtcagatgcgcgttggactgaactgttaccgcttctgcaacagtcggaagtggtgcgcctggatgactgcggcctcactgagagtcgctgcaaagacatcagtagtgcactgcaagccaacccacgtttgaccgaattaagcctgtgtacaaatgagctgggtgatgctggagttaccttagtcctgcagggcttgcagtctggcacgtgcaagattgaaaaactgtccctccagaactgttgtctgacgaagaccggttgcggtgtattaggcgacatgcttcgttcaatgcccaccctgcgcgcactgtatctgaatgataacccgttgggcgatgcgggcctccagctgctttgcagtgggctggtggacgaaaattgtcacctggagaaactgcaggtggaatactgcaatctcacagcagcctcgtgcgaaagcttggcgagcgctctgcgtgccaaacgtcattttaaagaattagcggtttcgaacaacgaactgggtgaagcaggcgtgcgcgtactttgtcgtgggctggtggagagtccatgccaactggaggttctgaaactggaaaattgtggattgacctctgcctcctgcgaggatctttgtctggtggtcgctagcaaaccaagcctccaggaattggaccttggcatgaacaaattaggtgaccaaggcatcgcaacgttatgcccgaccctgcttcacccttcatgccagattcgtgttttgtggctctggaactgtgatatcaccaccgccggctgccgcgacctctgtcaggtattacgcgcgaagccgtccctcaaagagctgagtcttgcgggtaatgccttgggagatgaaggcgcacgtctcttgtgcgaatcgttattaagtccgggctgccagctcgaaagcctttgggtgaaaagctgttctttcactgctgcttcatgccagcattttagttcgatgttgacgcgcaacaagtgtcttgttgagctccaattgagcaataataaattaggtgattgtggcgtgcagcagctttgccaagggttatctcaaccaggtgcggccctccaggttttgtggttgggcgactgtgatgtaggtcatagtggctgtgctagcttagcttccgtgttgcttgtcaaccgttccttacgcgaactcgaccttagtaacaactgcatgggcgaagaagggattctccgtttgatggagagcgttgaacaaccgggatgcgtgcttgaacagttggtcctctatgacatctactggtcggaggagatggatcgtcgtttacgtgccttagaagagcgcaaaccgtcattgcgcgtgattttc

SEQ ID NO: 628 - protein, 468 aa, synthetic construct
  REGION 1..468: note = Variant of RNase inhibitor
MHHHHHHGGSGTMSLDIQCQQLSDARWTELLPLLQQSEVVRLDDCGLTESRCKDISSALQANPRLTELSLCTNELGDAGVTLVLQGLQSGTCKIEKLSLQNCCLTKTGCGVLGDMLRSMPTLRALYLNDNPLGDAGLQLLCSGLVDENCHLEKLQVEYCNLTAASCESLASALRAKRHFKELAVSNNELGEAGVRVLCRGLVESPCQLEVLKLENCGLTSASCEDLCLVVASKPSLQELDLGMNKLGDQGIATLCPTLLHPSCQIRVLWLWNCDITTAGCRDLCQVLRAKPSLKELSLAGNALGDEGARLLCESLLSPGCQLESLWVKSCSFTAASCQHFSSMLTRNKCLVELQLSNNKLGDCGVQQLCQGLSQPGAALQVLWLGDCDVGHSGCASLASVLLVNRSLRELDLSNNCMGEEGILRLMESVEQPGCVLEQLVLYDIYWSEEMDRRLRALEERKPSLRVIF

SEQ ID NO: 629 - DNA, 1404 bp, synthetic construct
  misc_feature 1..1404: note = Variant of RNase inhibitor
  source 1..1404: mol_type = other DNA
atgcaccatcatcatcatcatggcggtagcggcacgatgtctctggatattcagtgtcaacaattgtcagatgcgcgttggactgaactgttaccgcttctgcaacagagcgaagtggtgcgcctggatgactgcggcctcactgagagtcgctgcaaagacatcagtagtgcactgcaagccaacccatcgttgaccgaattaagcctgtgtacaaatgagctgggtgatgctggagttaccttagtcctgcagggcttgcagtctggcacgtgcaagattgaaaaactgtccctccagaactgttgtctgacgaagactggttgcggtgtattaggcgacatgcttcgttcaatgcccaccctgcgcgcactgtatctgaatgataacccgttgggcgatgcgggcctccagctgctttgctccgggctggtggacgaaaattgtcacctggagaaactgcaggtggaatactgcaatctcacagcagcctcgtgcgaatttttggcgagcgctctgcgtgccaaacgccattttaaagaattagcggtttcgaacaacgaactgggtgaagcaggcgtgcgcgtactttgtcgtgggctggtggagagtccatgccaactggaggttctgaaactggaaaattgtggattgacctctgcctcctgcgaggatctttgtcgtgtggtcgctagcaaaccaagcctccaggaattggaccttggcatgaacaaattaggtgaccaaggcatcgcaacgttatgcccgaccctgcttcacccttcatgccagattcgtgttttgtggctctggaactgtgatatcaccaccgccggctgccgcgacctctgtcaggtattacgcgcgaagccgtccctcaaagagctgagtcttgcgggtaatgccttgggagatgaaggcgcacgtctcttgtgcgaatcgttattagaaccggcctgccagctcgaaagcctttgggtgaaaagctgttctttcactgctgcttcatgccagcattttagttcgatgttgacgcgcaacaagtgtcttgttgagctccaattgagcaataataaattaggtgattgtggcgtgcagcagctttgccaagggttatctcaaccaggtgcggccctccaggttttgtggttgggcgactgtgatgtaggtcatagtggctgtgcaagcttagcttccgtgttgcttgtcaaccgttccttacgcgaactcgaccttagtaacaactgcatgggcgaagaagggattctccgtttgatggagagcgttgaacaaccgggatgcgtgcttgaacagttggtcctctatgacatctactggtcggaggagatggatcgtcgtttacgtgccttagaagagcgcaaaccgtcattgcgcgtgattttc

SEQ ID NO: 630 - protein, 468 aa, synthetic construct
  REGION 1..468: note = Variant of RNase inhibitor
MHHHHHHGGSGTMSLDIQCQQLSDARWTELLPLLQQSEVVRLDDCGLTESRCKDISSALQANPSLTELSLCTNELGDAGVTLVLQGLQSGTCKIEKLSLQNCCLTKTGCGVLGDMLRSMPTLRALYLNDNPLGDAGLQLLCSGLVDENCHLEKLQVEYCNLTAASCEFLASALRAKRHFKELAVSNNELGEAGVRVLCRGLVESPCQLEVLKLENCGLTSASCEDLCRVVASKPSLQELDLGMNKLGDQGIATLCPTLLHPSCQIRVLWLWNCDITTAGCRDLCQVLRAKPSLKELSLAGNALGDEGARLLCESLLEPACQLESLWVKSCSFTAASCQHFSSMLTRNKCLVELQLSNNKLGDCGVQQLCQGLSQPGAALQVLWLGDCDVGHSGCASLASVLLVNRSLRELDLSNNCMGEEGILRLMESVEQPGCVLEQLVLYDIYWSEEMDRRLRALEERKPSLRVIF

SEQ ID NO: 631 - DNA, 1404 bp, synthetic construct
  misc_feature 1..1404: note = Variant of RNase inhibitor
  source 1..1404: mol_type = other DNA
atgcaccatcatcatcatcatggcggtagcggcacgatgtctctggatattcagtgtcaacaattgtcagatgcgcgttggactgaactgttaccgcttctgcaacagtcggaagtggtgcgcctggatgactgcggcctcactgagagtcgctgcaaagacatcagtagtgcactgcaagccaacccatcgttgaccgaattaagcctgtgtacaaatgagctgggtgatgctggagttaccttagtcctgcagggcttgcagtctggcacgtgcaagattgaaaaactgtccctccagaactgttgtctgacgaagaccggttgcggtgtattaggcgacatgcttcgttcaatgcccaccctgcgcgcactgtatctgaatgataacccgttgggcgatgcgggcctccagctgctttgcagtgggctggtggacgaaaattgtcacctggagaaactgcaggtggaatactgcaatctcacagcagcctcgtgcgaaagcttggcgagcgctctgcgtgccaagcgccattttaaagaattagcggtttcgaacaacgaactgggtgaagcaggcgtgcgcgtactttgtcgtgggctggtggagagtccatgccaactggaggttctgaaactggaaaattgtggattgacctctgcctcctgcgaggatctttgtcgtgtggtcgctagcaaaccaagcctccaggaattggaccttggcatgaacaaattaggtgaccaaggcatcgcaacgttatgcccgaccctgcttcacccttcatgccagattcgtgttttgtggctctggaactgtgatatcaccaccgccggctgccgcgacctctgtcaggtattacgcgcgaagccgtccctcaaagagctgagtcttgcgggtaatgccttgggagatgaaggcgcacgtctcttgtgcgaatcgttattagaaccgggctgccagctcgaaagcctttgggtgaaaagctgttctttcactgctgcttcatgccagcattttagttcgatgttgacgcgcaacaagtgtcttgttgagctccaattgagcaataataaattaggtgattgtggcgtgcagcagctttgccaagggttatctcaaccaggtgcggccctccaggttttgtggttgggcgactgtgatgtaggtcatagtggctgtctgagcttagcttccgtgttgcttgtcaaccgttccttacgcgaactcgaccttagtaacaactgcatgggcgaagaagggattctccgtttgatggagagcgttgaacaaccgggatgcgtgcttgaacagttggtcctctatgacatctactggtcggaggagatggatcgtcgtttacgtgccttagaagagcgcaaaccgtcattgcgcgtgattttc

SEQ ID NO: 632 - protein, 468 aa, synthetic construct
  REGION 1..468: note = Variant of RNase inhibitor
MHHHHHHGGSGTMSLDIQCQQLSDARWTELLPLLQQSEVVRLDDCGLTESRCKDISSALQANPSLTELSLCTNELGDAGVTLVLQGLQSGTCKIEKLSLQNCCLTKTGCGVLGDMLRSMPTLRALYLNDNPLGDAGLQLLCSGLVDENCHLEKLQVEYCNLTAASCESLASALRAKRHFKELAVSNNELGEAGVRVLCRGLVESPCQLEVLKLENCGLTSASCEDLCRVVASKPSLQELDLGMNKLGDQGIATLCPTLLHPSCQIRVLWLWNCDITTAGCRDLCQVLRAKPSLKELSLAGNALGDEGARLLCESLLEPGCQLESLWVKSCSFTAASCQHFSSMLTRNKCLVELQLSNNKLGDCGVQQLCQGLSQPGAALQVLWLGDCDVGHSGCLSLASVLLVNRSLRELDLSNNCMGEEGILRLMESVEQPGCVLEQLVLYDIYWSEEMDRRLRALEERKPSLRVIF

SEQ ID NO: 633 - DNA, 1404 bp, synthetic construct
  misc_feature 1..1404: note = Variant of RNase inhibitor
  source 1..1404: mol_type = other DNA
atgcaccatcatcatcatcatggcggtagcggcacgatgtctctggatattcagtgtcaacaattgtcagatgcgcgttggactgaactgttaccgcttctgcaacaggcggaagtggtgcgcctggatgactgcggcctcactgagagtcgctgcaaagacatcagtagtgcactgcaagccaacccatcgttgaccgaattaagcctgtgtacaaatgagctgggtgatgctggagttaccttagtcctgcagggcttgcagtctggcacgtgcaagattgaaaaactgtccctccagaactgttgtctgacgaaggatggttgcggtgtattaggcgacatgcttcgttcaatgcccaccctgcgcgcactgtatctgaatgataacccgttgggcgatgcgggcctccagctgctttgctccgggctggtggacgaaaattgtcacctggagaaactgcaggtggaatactgcaatctcacagcagcctcgtgcgaaagcttggcgagcgctctgcgtgccaaacgccattttaaagaattagcggtttcgaacaacgaactgggtgaagcaggcgtgcgcgtactttgtcgtgggctggtggagagtccatgccaactggaggttctgaaactggaaaattgtggattgacctctgcctcctgcgaggatctttgtctggtggtcgctagcaaaccaagcctccaggaattggaccttggcatgaacaaattaggtgaccaaggcatcgcaacgttatgcccgaccctgcttcacccttcatgccagattcgtgttttgtggctctggaactgtgatatcaccaccgccggctgccgcgacctctgtcaggtattacgcgcgaagccgtccctcaaagagctgagtcttgcgggtaatgccttgggagatgaaggcgcacgtctcttgtgcgaatcgttattagaaccggcctgccagctcgaaagcctttgggtgaaaagctgttctttcactgctgcttcatgccagcattttagttcgatgttgacgcgcaacaagtgtcttgttgagctccaattgagcaataataaattaggtgattgtggcgtgcagcagctttgccaagggttatctcaaccaggtgcggccctccaggttttgtggttgggcgactgtgatgtaggtcatagtggctgtgcaagcttagcttccgtgttgcttgtcaaccgttccttacgcgaactcgaccttagtaacaactgcatgggcgaagaagggattctccgtttgatggagagcgttgaacaaccgggatgcgtgcttgaacagttggtcctctatgacatctactggtcggaggagatggatcgtcgtttacgtgccttagaagagcgcaaaccgtcattgcgcgtgattttc

SEQ ID NO: 634 - protein, 468 aa, synthetic construct
  REGION 1..468: note = Variant of RNase inhibitor
MHHHHHHGGSGTMSLDIQCQQLSDARWTELLPLLQQAEVVRLDDCGLTESRCKDISSALQANPSLTELSLCTNELGDAGVTLVLQGLQSGTCKIEKLSLQNCCLTKDGCGVLGDMLRSMPTLRALYLNDNPLGDAGLQLLCSGLVDENCHLEKLQVEYCNLTAASCESLASALRAKRHFKELAVSNNELGEAGVRVLCRGLVESPCQLEVLKLENCGLTSASCEDLCLVVASKPSLQELDLGMNKLGDQGIATLCPTLLHPSCQIRVLWLWNCDITTAGCRDLCQVLRAKPSLKELSLAGNALGDEGARLLCESLLEPACQLESLWVKSCSFTAASCQHFSSMLTRNKCLVELQLSNNKLGDCGVQQLCQGLSQPGAALQVLWLGDCDVGHSGCASLASVLLVNRSLRELDLSNNCMGEEGILRLMESVEQPGCVLEQLVLYDIYWSEEMDRRLRALEERKPSLRVIF

SEQ ID NO: 635 - DNA, 1404 bp, synthetic construct
  misc_feature 1..1404: note = Variant of RNase inhibitor
  source 1..1404: mol_type = other DNA
atgcaccatcatcatcatcatggcggtagcggcacgatgtctctggatattcagtgtcaacaattgtcagatgcgcgttggactgaactgttaccgcttctgcaacagtcggaagtggtgcgcctggatgactgcggcctcactgagagtcgctgcaaagacatcagtagtgcactgcaagccaacccatcgttgatcgaattaagcctgtgtacaaatgagctgggtgatgctggagttaccttagtcctgcagggcttgcagtctggcacgtgcaagattgaaaaactgtccctccagaactgttgtctgacgaagaccggttgcggtgtattaggcgacatgcttcgttcaatgcccaccctgcgcgcactgtatctgaatgataacccgttgggcgatgcgggcctccagctgctttgccaggggctggtggacgaaaattgtcacctggagaaactgcaggtggaatactgcaatctcacagcagcctcgtgcgaaagcttggcgagcgctctgcgtgccaaacgccattttaaagaattagcggtttcgaacaacgaactgggtgaagcaggcgtgcgcgtactttgtcgtgggctggtggagagtccatgccaactggaggttctgaaactggaaaattgtggattgacctctgcctcctgcgaggatctttgtcgtgtggtcgctagcaaaccaagcctccaggaattggaccttggcatgaacaaattaggtgaccaaggcatcgcaacgttatgcccgaccctgcttcacccttcatgccagattcgtgttttgtggctctggaactgtgatatcaccaccgccggctgccgcgacctctgtcaggtattacgcgcgaagccgtccctcaaagagctgagtcttgcgggtaatgccttgggagatgaaggcgcacgtctcttgtgcgaatcgttattagaaccggcctgccagctcgaaagcctttgggtgaaaagctgttctttcactgctgcttcatgccagcattttagttcgatgttgacgcgcaacaagtgtcttgttgagctccaattgagcaataataaattaggtgattgtggcgtgcagcagctttgccaagggttatctcaaccaggtgcggccctccaggttttgtggttgggcgactgtgatgtaggtcatagtggctgtgctagcttagcttccgtgttgcttgtcaaccgttccttacgcgaactcgaccttagtaacaactgcatgggcgaagaagggattctccgtttgatggagagcgttgaacaaccgggatgcgtgcttgaacagttggtcctctatgacatctactggtcggaggagatggatcgtcgtttacgtgccttagaagagcgcaaaccgtcattgcgcgtgattttc

SEQ ID NO: 636 - protein, 468 aa, synthetic construct
  REGION 1..468: note = Variant of RNase inhibitor
MHHHHHHGGSGTMSLDIQCQQLSDARWTELLPLLQQSEVVRLDDCGLTESRCKDISSALQANPSLIELSLCTNELGDAGVTLVLQGLQSGTCKIEKLSLQNCCLTKTGCGVLGDMLRSMPTLRALYLNDNPLGDAGLQLLCQGLVDENCHLEKLQVEYCNLTAASCESLASALRAKRHFKELAVSNNELGEAGVRVLCRGLVESPCQLEVLKLENCGLTSASCEDLCRVVASKPSLQELDLGMNKLGDQGIATLCPTLLHPSCQIRVLWLWNCDITTAGCRDLCQVLRAKPSLKELSLAGNALGDEGARLLCESLLEPACQLESLWVKSCSFTAASCQHFSSMLTRNKCLVELQLSNNKLGDCGVQQLCQGLSQPGAALQVLWLGDCDVGHSGCASLASVLLVNRSLRELDLSNNCMGEEGILRLMESVEQPGCVLEQLVLYDIYWSEEMDRRLRALEERKPSLRVIF

SEQ ID NO: 637 - DNA, 1404 bp, synthetic construct
  misc_feature 1..1404: note = Variant of RNase inhibitor
  source 1..1404: mol_type = other DNA
atgcaccatcatcatcatcatggcggtagcggcacgatgtctctggatattcagtgtcaacaattgtcagatgcgcgttggactgaactgttaccgcttctgcaacaggcggaagtggtgcgcctggatgactgcggcctcactgagagtcgctgcaaagacatcagtagtgcactgcaagccaacccatcgttgaccgaattaagcctgtgtacaaatgagctgggtgatgctggagttaccttagtcctgcagggcttgcagtctggcacgtgcaagattgaaaaactgtccctccagaactgttgtctgacgaagactggttgcggtgtattaggcgacatgcttcgttcaatgcccaccctgcgcgcactgtatctgaatgataacccgttgggcgatgcgggcctccagctgctttgctccgggctggtggacgaaaattgtcacctggagaaactgcaggtggaatactgcaatctcacagcagcctcgtgcgaaagcttggcgagcgctctgcgtgccaaacgccattttaaagaattagcggtttcgaacaacgaactgggtgaagcaggcgtgcgcgtactttgtcgtgggctggtggagagtccatgccaactggaggttctgaaactggaaaattgtggattgacctctgcctcctgcgaggatctttgtcgtgtggtcgctagcaaaccaagcctccaggaattggaccttggcatgaacaaattaggtgaccaaggcatcgcaacgttatgcccgaccctgcttcacccttcatgccagattcgtgttttgtggctctggaactgtgatatcaccaccgccggctgccgcgacctctgtcaggtattacgcgcgaagccgtccctcaaagagctgagtcttgcgggtaatgccttgggagatgaaggcgcacgtctcttgtgcgaatcgttattagaaccggcctgccagctcgaaagcctttgggtgaaaagctgttctttcactgctgcttcatgccagcattttagtatgatgttgacgcgcaacaagtgtcttgttgagctccaattgagcaataataaattaggtgattgtggcgtgcagcagctttgccaagggttatctcaaccaggtgcggccctccaggttttgtggttgggcgactgtgatgtaggtcatagtggctgtgcaagcttagcttccgtgttgcttgtcaaccgttccttacgcgaactcgaccttagtaacaactgcatgggcgaagaagggattctccgtttgatggagagcgttgaacaaccgggatgcgtgcttgaacagttggtcctctatgacatctactggtcggaggagatggatcgtcgtttacgtgccttagaagagcgcaaaccgtcattgcgcgtgattttc

SEQ ID NO: 638 - protein, 468 aa, synthetic construct
  REGION 1..468: note = Variant of RNase inhibitor
MHHHHHHGGSGTMSLDIQCQQLSDARWTELLPLLQQAEVVRLDDCGLTESRCKDISSALQANPSLTELSLCTNELGDAGVTLVLQGLQSGTCKIEKLSLQNCCLTKTGCGVLGDMLRSMPTLRALYLNDNPLGDAGLQLLCSGLVDENCHLEKLQVEYCNLTAASCESLASALRAKRHFKELAVSNNELGEAGVRVLCRGLVESPCQLEVLKLENCGLTSASCEDLCRVVASKPSLQELDLGMNKLGDQGIATLCPTLLHPSCQIRVLWLWNCDITTAGCRDLCQVLRAKPSLKELSLAGNALGDEGARLLCESLLEPACQLESLWVKSCSFTAASCQHFSMMLTRNKCLVELQLSNNKLGDCGVQQLCQGLSQPGAALQVLWLGDCDVGHSGCASLASVLLVNRSLRELDLSNNCMGEEGILRLMESVEQPGCVLEQLVLYDIYWSEEMDRRLRALEERKPSLRVIF

SEQ ID NO: 639 - DNA, 1404 bp, synthetic construct
  misc_feature 1..1404: note = Variant of RNase inhibitor
  source 1..1404: mol_type = other DNA
atgcaccatcatcatcatcatggcggtagcggcacgatgtctctggatattcagtgtcaacaattgtcagatgcgcgttggactgaactgttaccgcttctgcaacagtcggaagtggtgcgcctggatgactgcggcctcactgagagtcgctgcaaagacatcagtagtgcactgaaagccaacccacgtttgaccgaattaagcctgtgtacaaatgagctgggtgatgctggagttaccttagtcctgcagggcttgcagtctggcacgtgcaagattgaaaaactgtccctccagaactgttgtctgacgaagactggttgcggtgtattaggcgacatgcttcgttcaatgcccaccctgcgcgcactgtatctgaatgataacccgttgggcgatgcgggcctccagctgctttgctccgggctggtggacgaaaattgtcacctggagaaactgcaggtggaatactgcaatctcacagcagcctcgtgcgaaagcttggcgagcgctctgcgtgcctcgcgccattttaaagaattagcggtttcgaacaacgaactgggtgaagcaggcgtgcgcgtactttgtcgtgggctggtggagagtccatgccaactggaggttctgaaactggaaaattgtggattgacctctgcctcctgcgaggatctttgtctggtggtcgctagcaaaccaagcctccaggaattggaccttggcatgaacaaattaggtgaccaaggcatcgcaacgttatgcccgaccctgcttcacccttcatgccagattcgtgttttgtggctctggaactgtgatatcaccaccgccggctgccgcgacctctgtcaggtattacgcgcgaagccgtccctcaaagagctgagtcttgcgggtaatgccttgggagatgaaggcgcacgtctcttgtgcgaatcgttattagaaccggcctgccagctcgaaagcctttgggtgaaaagctgttctttcactgctgcttcatgccagcattttagttcgatgttgacgcgcaacaagtgtcttgttgagctccaattgagcaataataaattaggtgattgtggcgtgcagcagctttgccaagggttatctcaaccaggtgcggccctccaggttttgtggttgggcgactgtgatgtaggtcatagtggctgtctgagcttagcttccgtgttgcttgtcaaccgttccttacgcgaactcgaccttagtaacaactgcatgggcgaagaagggattctccgtttgatggagagcgttgaacaaccgggatgcgtgcttgaacagttggtcctctatgacatctactggtcggaggagatggatcgtcgtttacgtgccttagaagagcgcaaaccgtcattgcgcgtgattttc

SEQ ID NO: 640 - protein, 468 aa, synthetic construct
  REGION 1..468: note = Variant of RNase inhibitor
MHHHHHHGGSGTMSLDIQCQQLSDARWTELLPLLQQSEVVRLDDCGLTESRCKDISSALKANPRLTELSLCTNELGDAGVTLVLQGLQSGTCKIEKLSLQNCCLTKTGCGVLGDMLRSMPTLRALYLNDNPLGDAGLQLLCSGLVDENCHLEKLQVEYCNLTAASCESLASALRASRHFKELAVSNNELGEAGVRVLCRGLVESPCQLEVLKLENCGLTSASCEDLCLVVASKPSLQELDLGMNKLGDQGIATLCPTLLHPSCQIRVLWLWNCDITTAGCRDLCQVLRAKPSLKELSLAGNALGDEGARLLCESLLEPACQLESLWVKSCSFTAASCQHFSSMLTRNKCLVELQLSNNKLGDCGVQQLCQGLSQPGAALQVLWLGDCDVGHSGCLSLASVLLVNRSLRELDLSNNCMGEEGILRLMESVEQPGCVLEQLVLYDIYWSEEMDRRLRALEERKPSLRVIF

SEQ ID NO: 641 - DNA, 1404 bp, synthetic construct
  misc_feature 1..1404: note = Variant of RNase inhibitor
  source 1..1404: mol_type = other DNA
atgcaccatcatcatcatcatggcggtagcggcacgatgtctctggatattcagtgtcaacaattgtcagatgcgcgttggactgaactgttaccgcttctgcaacagtcggaagtggtgcgcctggatgactgcggcctcactgagagtcgctgcaaagacatcagtagtgcactgaaagccaacccacgtttgaccgaattaagcctgtgtacaaatgagctgggtgatgctggagttaccttagtcctgcagggcttgcagtctggcacgtgcaagattgaaaaactgtccctccagaactgttgtctgacgaagactggttgcggtgtattaggcgacatgcttcgttcaatgcccaccctgcgcgcactgtatctgaatgataacccgttgggcgatgcgggcctccagctgctttgctccgggctggtggacgaaaattgtcacctggagaaactgcaggtggaatactgcaatctcacagcagcctcgtgcgaaagcttggcgagcgctctgcgtgccaaacgccattttaaagaattagcggtttcgaacaacgaactgggtgaagcaggcgtgcgcgtactttgtcgtgggctggtggagagtccatgccaactggaggttctgaaactggaaaattgtggattgacctctgcctcctgcgaggatctttgtcgtgtggtcgctagcaaaccaagcctccaggaattggaccttggcatgaacaaattaggtgaccaaggcatcgcaacgttatgcccgaccctgcttcacccttcatgccagattcgtgttttgtggctctggaactgtgatatcaccaccgccggctgccgcgacctctgtcaggtattacgcgcgaagccgtccctcaaagagctgagtcttgcgggtaatgccttgggagatgaaggcgcacgtctcttgtgcgaatcgttattagaaccggcctgccagctcgaaagcctttgggtgaaaagctgttctttcactgctgcttcatgccagcattttagtatgatgttgacgcgcaacaagtgtcttgttgagctccaattgagcaataataaattaggtgattgtggcgtgcagcagctttgccaagggttatctcaaccaggtgcggccctccaggttttgtggttgggcgactgtgatgtaggtcatagtggctgtgctagcttagcttccgtgttgcttgtcaaccgttccttacgcgaactcgaccttagtaacaactgcatgggcgaagaagggattctccgtttgatggagagcgttgaacaaccgggatgcgtgcttgaacagttggtcctctatgacatctactggtcggaggagatggatcgtcgtttacgtgccttagaagagcgcaaaccgtcattgcgcgtgattttc

SEQ ID NO: 642 - protein, 468 aa, synthetic construct
  REGION 1..468: note = Variant of RNase inhibitor
MHHHHHHGGSGTMSLDIQCQQLSDARWTELLPLLQQSEVVRLDDCGLTESRCKDISSALKANPRLTELSLCTNELGDAGVTLVLQGLQSGTCKIEKLSLQNCCLTKTGCGVLGDMLRSMPTLRALYLNDNPLGDAGLQLLCSGLVDENCHLEKLQVEYCNLTAASCESLASALRAKRHFKELAVSNNELGEAGVRVLCRGLVESPCQLEVLKLENCGLTSASCEDLCRVVASKPSLQELDLGMNKLGDQGIATLCPTLLHPSCQIRVLWLWNCDITTAGCRDLCQVLRAKPSLKELSLAGNALGDEGARLLCESLLEPACQLESLWVKSCSFTAASCQHFSMMLTRNKCLVELQLSNNKLGDCGVQQLCQGLSQPGAALQVLWLGDCDVGHSGCASLASVLLVNRSLRELDLSNNCMGEEGILRLMESVEQPGCVLEQLVLYDIYWSEEMDRRLRALEERKPSLRVIF

SEQ ID NO: 643 - DNA, 1404 bp, synthetic construct
  misc_feature 1..1404: note = Variant of RNase inhibitor
  source 1..1404: mol_type = other DNA
atgcaccatcatcatcatcatggcggtagcggcacgatgtctctggatattcagtgtcaacaattgtcagatgcgcgttggacggaactgttaccgcttctgcgtcagagcgaagtggtgcgcctggatgactgcggcctcactgagagtcgctgcaaagacatcagtagtgcactgcaagccaacccatcgttgaccgaattaagcctgtgtacaaatgagctgggtgatgctggagttaccttagtcctgcagggcttgcagtctggcacgtgcaagattgaaaaactgtccctccagaactgttgtctgacgaagactggttgcggtgtattaggcgacatgcttcgttcaatgcccaccctgcgcgcactgtatctgaatgataacccgttgggcgatgcgggcctccagctgctttgctccgggctggtggacgaaaattgtcacctggagaaactgcaggtggaatactgcaatctcacagcagcctcgtgcgaaagcttggcgagcgctctgcgtgccaaacgccattttaaagaattagcggtttcgaacaacgaactgggtgaagcaggcgtgcgcgtactttgtcgtgggctggtggagagtccatgccaactggaggttctgaaactggaaaattgtggattgacctctgcctcctgcgaggatctttgtcgtgtggtcgctagcaaaccaagcctccaggaattggaccttggcatgaacaaattaggtgaccaaggcatcgcaacgttatgcccgaccctgcttcacccttcatgccagattcgtgttttgtggctctggaactgtgatatcaccaccgccggctgccgcgacctctgtcaggtattacgcgcgaagccgtccctcaaagagctgagtcttgcgggtaatgccttgggagatgaaggcgcacgtctcttgtgcgaatcgttattagaaccggcctgccagctcgaaagcctttgggtgaaaagctgttctttcactgctgcttcatgccagcattttagttcgatgttgacgcgcaacaagtgtcttgttgagctccaattgagcaataataaattaggtgattgtggcgtgcagcagctttgccaagggttatctcaaccaggtgcggccctccaggttttgtggttgggcgactgtgatgtaggtcatagtggctgtgcaagcttagcttccgtgttgcttgtcaaccgttccttacgcgaactcgaccttagtaacaactgcatgggcgaagaagggattctccgtttgatggagagcgttgaacaaccgggatgcgtgcttgaacagttggtcctctatgacatctactggtcggaggagatggatcgtcgtttacgtgccttagaagagcgcaaaccgtcattgcgcgtgattttc

SEQ ID NO: 644 - protein, 468 aa, synthetic construct
  REGION 1..468: note = Variant of RNase inhibitor
MHHHHHHGGSGTMSLDIQCQQLSDARWTELLPLLRQSEVVRLDDCGLTESRCKDISSALQANPSLTELSLCTNELGDAGVTLVLQGLQSGTCKIEKLSLQNCCLTKTGCGVLGDMLRSMPTLRALYLNDNPLGDAGLQLLCSGLVDENCHLEKLQVEYCNLTAASCESLASALRAKRHFKELAVSNNELGEAGVRVLCRGLVESPCQLEVLKLENCGLTSASCEDLCRVVASKPSLQELDLGMNKLGDQGIATLCPTLLHPSCQIRVLWLWNCDITTAGCRDLCQVLRAKPSLKELSLAGNALGDEGARLLCESLLEPACQLESLWVKSCSFTAASCQHFSSMLTRNKCLVELQLSNNKLGDCGVQQLCQGLSQPGAALQVLWLGDCDVGHSGCASLASVLLVNRSLRELDLSNNCMGEEGILRLMESVEQPGCVLEQLVLYDIYWSEEMDRRLRALEERKPSLRVIF

SEQ ID NO: 645 - DNA, 1404 bp, synthetic construct
  misc_feature 1..1404: note = Variant of RNase inhibitor
  source 1..1404: mol_type = other DNA
atgcaccatcatcatcatcatggcggtagcggcacgatgtctctggatattcagtgtcaacaattgtcagatgcgcgttggactgaactgttaccgcttctgcaacagagcgaagtggtgcgcctggatgactgcggcctcactgagagtcgctgcaaagacatcagtagtgcactgaaagccaacccatcgttgatcgaattaagcctgtgtacaaatgagctgggtgatgctggagttaccttagtcctgcagggcttgcagtctggcacgtgcaagattgaaaaactgtccctccagaactgttgtctgacgaagactggttgcggtgtattaggcgacatgcttcgttcaatgcccaccctgcgcgcactgtatctgaatgataacccgttgggcgatgcgggcctccagctgctttgctccgggctggtggacgaaaattgtcacctggagaaactgcaggtggaatactgcaatctcacagcagcctcgtgcgaaagcttggcgagcgctctgcgtgccaaacgccattttaaagaattagcggtttcgaacaacgaactgggtgaagcaggcgtgcgcgtactttgtcgtgggctggtggagagtccatgccaactggaggttctgaaactggaaaattgtggattgacctctgcctcctgcgaggatctttgtcgtgtggtcgctagcaaaccaagcctccaggaattggaccttggcatgaacaaattaggtgaccaaggcatcgcaacgttatgcccgaccctgcttcacccttcatgccagattcgtgttttgtggctctggaactgtgatatcaccaccgccggctgccgcgacctctgtcaggtattacgcgcgaagccgtccctcaaagagctgagtcttgcgggtaatgccttgggagatgaaggcgcacgtctcttgtgcgaatcgttattagaaccggcctgccagctcgaaagcctttgggtgaaaagctgttctttcactgctgcttcatgccagcattttagttcgatgttgacgcgcaacaagtgtcttgttgagctccaattgagcaataataaattaggtgattgtggcgtgcagcagctttgccaagggttatctcaaccaggtgcggccctccaggttttgtggttgggcgactgtgatgtaggtcatagtggctgtctgagcttagcttccgtgttgcttgtcaaccgttccttacgcgaactcgaccttagtaacaactgcatgggcgaagaagggattctccgtttgatggagagcgttgaacaaccgggatgcgtgcttgaacagttggtcctctatgacatctactggtcggaggagatggatcgtcgtttacgtgccttagaagagcgcaaaccgtcattgcgcgtgattttc

SEQ ID NO: 646 - protein, 468 aa, synthetic construct
  REGION 1..468: note = Variant of RNase inhibitor
MHHHHHHGGSGTMSLDIQCQQLSDARWTELLPLLQQSEVVRLDDCGLTESRCKDISSALKANPSLIELSLCTNELGDAGVTLVLQGLQSGTCKIEKLSLQNCCLTKTGCGVLGDMLRSMPTLRALYLNDNPLGDAGLQLLCSGLVDENCHLEKLQVEYCNLTAASCESLASALRAKRHFKELAVSNNELGEAGVRVLCRGLVESPCQLEVLKLENCGLTSASCEDLCRVVASKPSLQELDLGMNKLGDQGIATLCPTLLHPSCQIRVLWLWNCDITTAGCRDLCQVLRAKPSLKELSLAGNALGDEGARLLCESLLEPACQLESLWVKSCSFTAASCQHFSSMLTRNKCLVELQLSNNKLGDCGVQQLCQGLSQPGAALQVLWLGDCDVGHSGCLSLASVLLVNRSLRELDLSNNCMGEEGILRLMESVEQPGCVLEQLVLYDIYWSEEMDRRLRALEERKPSLRVIF

SEQ ID NO: 647 - DNA, 1404 bp, synthetic construct
  misc_feature 1..1404: note = Variant of RNase inhibitor
  source 1..1404: mol_type = other DNA
atgcaccatcatcatcatcatggcggtagcggcacgatgtctctggatattcagtgtcaacaattgtcagatgcgcgttggactgaactgttaccgcttctgcaacagagcgaagtggtgcgcctggatgactgcggcctcactgagagtcgctgcaaagacatcagtagtgcactgcaagccaacccatcgttgaccgaattaagcctgtgtacaaatgagctgggtgatgctggagttaccttagtcctgcagggcttgcagtctggcacgtgcaagattgaaaaactgtccctccagaactgttgtctgacgaagactggttgcggtgtattaggcgacatgcttcgttcaatgcccaccctgcgcgcactgtatctgaatgataacccgttgggcgatgcgggcctccagctgctttgctccgggctggtggacgaaaattgtcacctggagaaactgcaggtggaatactgcaatctcacagcagcctcgtgcgaaagcttggcgagcgctctgcgtgccaaacgtcattttaaagaattagcggtttcgaacaacgaactgggtgaagcaggcgtgcgcgtactttgtcgtgggctggtggagagtccatgccaactggaggttctgaaactggaaaattgtggattgacctctgcctcctgcgaggatctttgtcgtgtggtcgctagcaaaccaagcctccaggaattggaccttggcatgaacaaattaggtgaccaaggcatcgcaacgttatgcccgaccctgcttcacccttcatgccagattcgtgttttgtggctctggaactgtgatatcaccaccgccggctgccgcgacctctgtcaggtattacgcgcgaagccgtccctcaaagagctgagtcttgcgggtaatgccttgggagatgaaggcgcacgtctcttgtgcgaatcgttattagaaccgggctgccagctcgaaagcctttgggtgaaaagctgttctttcactgctgcttcatgccagcattttagttcgatgttgacgcgcaacaagtgtcttgttgagctccaattgagcaataataaattaggtgattgtggcgtgcagcagctttgccaagggttatctcaaccaggtgcggccctccaggttttgtggttgggcgactgtgatgtaggtcatagtggctgtgcaagcttagcttccgtgttgcttgtcaaccgttccttacgcgaactcgaccttagtaacaactgcatgggcgaagaagggattctccgtttgatggagagcgttgaacaaccgggatgcgtgcttgaacagttggtcctctatgacatctactggtcggaggagatggatcgtcgtttacgtgccttagaagagcgcaaaccgtcattgcgcgtgattttc

SEQ ID NO: 648 - protein, 468 aa, synthetic construct
  REGION 1..468: note = Variant of RNase inhibitor
MHHHHHHGGSGTMSLDIQCQQLSDARWTELLPLLQQSEVVRLDDCGLTESRCKDISSALQANPSLTELSLCTNELGDAGVTLVLQGLQSGTCKIEKLSLQNCCLTKTGCGVLGDMLRSMPTLRALYLNDNPLGDAGLQLLCSGLVDENCHLEKLQVEYCNLTAASCESLASALRAKRHFKELAVSNNELGEAGVRVLCRGLVESPCQLEVLKLENCGLTSASCEDLCRVVASKPSLQELDLGMNKLGDQGIATLCPTLLHPSCQIRVLWLWNCDITTAGCRDLCQVLRAKPSLKELSLAGNALGDEGARLLCESLLEPGCQLESLWVKSCSFTAASCQHFSSMLTRNKCLVELQLSNNKLGDCGVQQLCQGLSQPGAALQVLWLGDCDVGHSGCASLASVLLVNRSLRELDLSNNCMGEEGILRLMESVEQPGCVLEQLVLYDIYWSEEMDRRLRALEERKPSLRVIF

SEQ ID NO: 649 - DNA, 1404 bp, synthetic construct
  misc_feature 1..1404: note = Variant of RNase inhibitor
  source 1..1404: mol_type = other DNA
atgcaccatcatcatcatcatggcggtagcggcacgatgtctctggatattcagtgtcaacaattgtcagatgcgcgttggactgaactgttaccgcttctgcaacagagcgaagtggtgcgcctggatgactgcggcctcactgagagtcgctgcaaagacatcagtagtgcactgcaagccaacccaagtttgaccgaattaagcctgtgtacaaatgagctgggtgatgctggagttaccttagtcctgcagggcttgcagtctggcacgtgcaagattgaaaaactgtccctccagaactgttgtctgacgaagactggttgcggtgtattaggcgacatgcttcgttcaatgcccaccctgcgcgcactgtatctgaatgataacccgttgggcgatgcgggcctccagctgctttgcagtgggctggtggacgaaaattgtcacctggagaaactgcaggtggaatactgcaatctcacagcagcctcgtgcgaaagcttggcgagcgctctgcgtgccaagcgccattttaaagaattagcggtttcgaacaacgaactgggtgaagcaggcgtgcgcgtactttgtcgtgggctggtggagagtccatgccaactggaggttctgaaactggaaaattgtggattgacctctgcctcctgcgaggatctttgtcgtgtggtcgctagcaaaccaagcctccaggaattggaccttggcatgaacaaattaggtgaccaaggcatcgcaacgttatgcccgaccctgcttcacccttcatgccagattcgtgttttgtggctctggaactgtgatatcaccaccgccggctgccgcgacctctgtcaggtattacgcgcgaagtcgtccctcaaagagctgagtcttgcgggtaatgccttgggagatgaaggcgcacgtctcttgtgcgaatcgttattaagtccgggctgccagctcgaaagcctttgggtgaaaagctgttctttcactgctgcttcatgccagcattttagtatgatgttgacgcgcaacaagtgtcttgttgagctccaattgagcaataataaattaggtgattgtggcgtgcagcagctttgccaagggttatctcaaccaggtgcggccctccaggttttgtggttgggcgactgtgatgtaggtcatagtggctgtctgagcttagcttccgtgttgcttgtcaaccgttccttacgcgaactcgaccttagtaacaactgcatgggcgaagaagggattctccgtttgatggagagcgttgaacaaccgggatgcgtgcttgaacagttggtcctctatgacatctactggtcggaggagatggatcgtcgtttacgtgccttagaagagcgcaaaccgtcattgcgcgtgattttc

SEQ ID NO: 650 - protein, 468 aa, synthetic construct
  REGION 1..468: note = Variant of RNase inhibitor
MHHHHHHGGSGTMSLDIQCQQLSDARWTELLPLLQQSEVVRLDDCGLTESRCKDISSALQANPSLTELSLCTNELGDAGVTLVLQGLQSGTCKIEKLSLQNCCLTKTGCGVLGDMLRSMPTLRALYLNDNPLGDAGLQLLCSGLVDENCHLEKLQVEYCNLTAASCESLASALRAKRHFKELAVSNNELGEAGVRVLCRGLVESPCQLEVLKLENCGLTSASCEDLCRVVASKPSLQELDLGMNKLGDQGIATLCPTLLHPSCQIRVLWLWNCDITTAGCRDLCQVLRAKSSLKELSLAGNALGDEGARLLCESLLSPGCQLESLWVKSCSFTAASCQHFSMMLTRNKCLVELQLSNNKLGDCGVQQLCQGLSQPGAALQVLWLGDCDVGHSGCLSLASVLLVNRSLRELDLSNNCMGEEGILRLMESVEQPGCVLEQLVLYDIYWSEEMDRRLRALEERKPSLRVIF

SEQ ID NO: 651 - DNA, 1404 bp, synthetic construct
  misc_feature 1..1404: note = Variant of RNase inhibitor
  source 1..1404: mol_type = other DNA
atgcaccatcatcatcatcatggcggtagcggcacgatgtctctggatattcagtgtcaacaattgtcagatgcgcgttggactgaactgttaccgcttctgcaacaggcggaagtggtgcgcctggatgactgcggcctcactgagagtcgctgcaaagacatcagtagtgcactgcaagccaacccatcgttgaccgaattaagcctgtgtacaaatgagctgggtgatgctggagttaccttagtcctgcagggcttgcagtctggcacgtgcaagattgaaaaactgtccctccagaactgttgtctgacgaagactggttgcggtgtattaggcgacatgcttcgttcaatgcccaccctgcgcgcactgtatctgaatgataacccgttgggcgatgcgggcctccagctgctttgctccgggctggtggacgaaaattgtcacctggagaaactgcaggtggaatactgcaatctcacagcagcctcgtgcgaaagcttggcgagcgctctgcgtgccaaaacgcattttaaagaattagcggtttcgaacaacgaactgggtgaagcaggcgtgcgcgtactttgtcgtgggctggtggagagtccatgccaactggaggttctgaaactggaaaattgtggattgacctctgcctcctgcgaggatctttgtcgtgtggtcgctagcaaaccaagcctccaggaattggaccttggcatgaacaaattaggtgaccaaggcatcgcaacgttatgcccgaccctgcttcacccttcatgccagattcgtgttttgtggctctggaactgtgatatcaccaccgccggctgccgcgacctctgtcaggtattacgcgcgaagccgtccctcaaagagctgagtcttgcgggtaatgccttgggagatgaaggcgcacgtctcttgtgcgaatcgttattagaaccggcctgccagctcgaaagcctttgggtgaaaagctgttctttcactgctgcttcatgccagcattttagttcgatgttgacgcgcaacaagtgtcttgttgagctccaattgagcaataataaattaggtgattgtggcgtgcagcagctttgccaagggttatctcaaccaggtgcggccctccaggttttgtggttgggcgactgtgatgtaggtcatagtggctgtgcaagcttagcttccgtgttgcttgtcaaccgttccttacgcgaactcgaccttagtaacaactgcatgggcgaagaagggattctccgtttgatggagagcgttgaacaaccgggatgcgtgcttgaacagttggtcctctatgacatctactggtcggaggagatggatcgtcgtttacgtgccttagaagagcgcaaaccgtcattgcgcgtgattttc

SEQ ID NO: 652 - protein, 468 aa, synthetic construct
  REGION 1..468: note = Variant of RNase inhibitor
MHHHHHHGGSGTMSLDIQCQQLSDARWTELLPLLQQAEVVRLDDCGLTESRCKDISSALQANPSLTELSLCTNELGDAGVTLVLQGLQSGTCKIEKLSLQNCCLTKTGCGVLGDMLRSMPTLRALYLNDNPLGDAGLQLLCSGLVDENCHLEKLQVEYCNLTAASCESLASALRAKTHFKELAVSNNELGEAGVRVLCRGLVESPCQLEVLKLENCGLTSASCEDLCRVVASKPSLQELDLGMNKLGDQGIATLCPTLLHPSCQIRVLWLWNCDITTAGCRDLCQVLRAKPSLKELSLAGNALGDEGARLLCESLLEPACQLESLWVKSCSFTAASCQHFSSMLTRNKCLVELQLSNNKLGDCGVQQLCQGLSQPGAALQVLWLGDCDVGHSGCASLASVLLVNRSLRELDLSNNCMGEEGILRLMESVEQPGCVLEQLVLYDIYWSEEMDRRLRALEERKPSLRVIF

SEQ ID NO: 653 - DNA, 1404 bp, synthetic construct
  misc_feature 1..1404: note = Variant of RNase inhibitor
  source 1..1404: mol_type = other DNA
atgcaccatcatcatcatcatggcggtagcggcacgatgtctctggatattcagtgtcaacaattgtcagatgcgcgttggactgaactgttaccgcttctgcaacagagcgaagtggtgcgcctggatgactgcggcctcactgagagtcgctgcaaagacatcagtagtgcactgcaagccaacccatcgttgaccgaattaagcctgtgtacaaatgagctgggtgatgctggagttaccttagtcctgcagggcttgcagtctggcacgtgcaagattgaaaaactgtccctccagaactgttgtctgacgaaggtgggttgcggtgtattaggcgacatgcttcgttcaatgcccaccctgcgcgcactgtatctgaatgataacccgttgggcgatgcgggcctccagctgctttgctccgggctggtggacgaaaattgtcacctggagaaactgcaggtggaatactgcaatctcacagcagcctcgtgcgaaagcttggcgagcgctctgcgtgccaaacgccattttaaagaattagcggtttcgaacaacgaactgggtgaagcaggcgtgcgcgtactttgtcgtgggctggtggagagtccatgccaactggaggttctgaaactggaaaattgtggattgacctctgcctcctgcgaggatctttgtcgtgtggtcgctagcaaaccaagcctccaggaattggaccttggcatgaacaaattaggtgaccaaggcatcgcaacgttatgcccgaccctgcttcacccttcatgccagattcgtgttttgtggctctggaactgtgatatcaccaccgccggctgccgcgacctctgtcaggtattacgcgcgaagccgtccctcaaagagctgagtcttgcgggtaatgccttgggagatgaaggcgcacgtctcttgtgcgaatcgttattagaaccggcctgccagctcgaaagcctttgggtgaaaagctgttctttcactgctgcttcatgccagcattttagttcgatgttgacgcgcaacaagtgtcttgttgagctccaattgagcaataataaattaggtgattgtggcgtgcagcagctttgccaagggttatctcaaccaggtgcggccctccaggttttgtggttgggcgactgtgatgtaggtcatagtggctgtgcaagcttagcttccgtgttgcttgtcaaccgttccttacgcgaactcgaccttagtaacaactgcatgggcgaagaagggattctccgtttgatggagagcgttgaacaaccgggatgcgtgcttgaacagttggtcctctatgacatctactggtcggaggagatggatcgtcgtttacgtgccttagaagagcgcaaaccgtcattgcgcgtgattttc

SEQ ID NO: 654 - protein, 468 aa, synthetic construct
  REGION 1..468: note = Variant of RNase inhibitor
MHHHHHHGGSGTMSLDIQCQQLSDARWTELLPLLQQSEVVRLDDCGLTESRCKDISSALQANPSLTELSLCTNELGDAGVTLVLQGLQSGTCKIEKLSLQNCCLTKVGCGVLGDMLRSMPTLRALYLNDNPLGDAGLQLLCSGLVDENCHLEKLQVEYCNLTAASCESLASALRAKRHFKELAVSNNELGEAGVRVLCRGLVESPCQLEVLKLENCGLTSASCEDLCRVVASKPSLQELDLGMNKLGDQGIATLCPTLLHPSCQIRVLWLWNCDITTAGCRDLCQVLRAKPSLKELSLAGNALGDEGARLLCESLLEPACQLESLWVKSCSFTAASCQHFSSMLTRNKCLVELQLSNNKLGDCGVQQLCQGLSQPGAALQVLWLGDCDVGHSGCASLASVLLVNRSLRELDLSNNCMGEEGILRLMESVEQPGCVLEQLVLYDIYWSEEMDRRLRALEERKPSLRVIF

SEQ ID NO: 655 - DNA, 1404 bp, synthetic construct
  misc_feature 1..1404: note = Variant of RNase inhibitor
  source 1..1404: mol_type = other DNA
atgcaccatcatcatcatcatggcggtagcggcacgatgtctctggatattcagtgtcaacaattgtcagatgcgcgttggactgaactgttaccgcttctgcaacaggcggaagtggtgcgcctggatgactgcggcctcactgagagtcgctgcaaagacatcagtagtgcactgcaagccaacccatcgttgaccgaattaagcctgtgtacaaatgagctgggtgatgctggagttaccttagtcctgcagggcttgcagtctggcacgtgcaagattgaaaaactgtccctccagaactgttgtctgacgaagactggttgcggtgtattaggcgacatgcttcgttcaatgcccaccctgcgcgcactgtatctgaatgataacccgttgggcgatgcgggcctccagctgctttgctccgggctggtggacgaaaattgtcacctggagaaactgcaggtggaatactgcaatctcacagcagcctcgtgcgaaagcttggcgagcgctctgcgtgccaaacgccattttaaagaattagcggtttcgaacaacgaactgggtgaagcaggcgtgcgcgtactttgtcgtgggctggtggagagtccatgccaactggaggttctgaaactggaaaattgtggattgacctctgcctcctgcgaggatctttgtcgtgtggtcgctagcaaaccaagcctccaggaattggaccttggcatgaacaaattaggtgaccaaggcatcgcaacgttatgcccgaccctgcttcacccttcatgccagattcgtgttttgtggctctggaactgtgatatcaccaccgccggctgccgcgacctctgtcaggtattacgcgcgaagccgtccctcaaagagctgagtcttgcgggtaatgccttgggagatgaaggcgcacgtctcttgtgcgaatcgttattagaaccggcctgccagctcgaaagcctttgggtgaaaagctgttctttcactgctgcttcatgccagcattttagttcgatgttgacgcgcaacaagtgtcttgttgagctccaattgagcaataataaattaggtgattgtggcgtgcagcagctttgccaagggttatctcaaccaggtgcggccctccaggttttgtggttgggcgactgtgatgtaggtcatagtggctgtgcaagcttagcttccgtgttgcttgtcaaccgttccttacgcgaactcgaccttagtaacaactgcatgggcgaagaagggattctccgtttgatggagagcgttgaacaaccgggatgcgtgcttgaacagttggtcctctatgacatctactggtcggaggagatggatcgtcgtttacgtgccttagaagagcgcaaaccgtcattgcgcgtgattttc

SEQ ID NO: 656 - protein, 468 aa, synthetic construct
  REGION 1..468: note = Variant of RNase inhibitor
MHHHHHHGGSGTMSLDIQCQQLSDARWTELLPLLQQAEVVRLDDCGLTESRCKDISSALQANPSLTELSLCTNELGDAGVTLVLQGLQSGTCKIEKLSLQNCCLTKTGCGVLGDMLRSMPTLRALYLNDNPLGDAGLQLLCSGLVDENCHLEKLQVEYCNLTAASCESLASALRAKRHFKELAVSNNELGEAGVRVLCRGLVESPCQLEVLKLENCGLTSASCEDLCRVVASKPSLQELDLGMNKLGDQGIATLCPTLLHPSCQIRVLWLWNCDITTAGCRDLCQVLRAKPSLKELSLAGNALGDEGARLLCESLLEPACQLESLWVKSCSFTAASCQHFSSMLTRNKCLVELQLSNNKLGDCGVQQLCQGLSQPGAALQVLWLGDCDVGHSGCASLASVLLVNRSLRELDLSNNCMGEEGILRLMESVEQPGCVLEQLVLYDIYWSEEMDRRLRALEERKPSLRVIF

SEQ ID NO: 657 - DNA, 1404 bp, synthetic construct
  misc_feature 1..1404: note = Variant of RNase inhibitor
  source 1..1404: mol_type = other DNA
atgcaccatcatcatcatcatggcggtagcggcacgatgtctctggatattcagtgtcaacaattgtcagatgcgcgttggactgaactgttaccgcttctgcaacaggcggaagtggtgcgcctggatgactgcggcctcactgagagtcgctgcaaagacatcagtagtgcactgaaagccaacccacgtttgaccgaattaagcctgtgtacaaatgagctgggtgatgctggagttaccttagtcctgcagggcttgcagtctggcacgtgcaagattgaaaaactgtccctccagaactgttgtctgacgaagaccggttgcggtgtattaggcgacatgcttcgttcaatgcccaccctgcgcgcactgtatctgaatgataacccgttgggcgatgcgggcctccagctgctttgccaggggctggtggacgaaaattgtcacctggagaaactgcaggtggaatactgcaatctcacagcagcctcgtgcgaaagcttggcgagcgctctgcgtgccaaacgtcattttaaagaattagcggtttcgaacaacgaactgggtgaagcaggcgtgcgcgtactttgtcgtgggctggtggagagtccatgccaactggaggttctgaaactggaaaattgtggattgacctctgcctcctgcgaggatctttgtcgtgtggtcgctagcaaaccaagcctccaggaattggaccttggcatgaacaaattaggtgaccaaggcatcgcaacgttatgcccgaccctgcttcacccttcatgccagattcgtgttttgtggctctggaactgtgatatcaccaccgccggctgccgcgacctctgtcaggtattacgcgcgaagtcgtccctcaaagagctgagtcttgcgggtaatgccttgggagatgaaggcgcacgtctcttgtgcgaatcgttattagaaccggcctgccagctcgaaagcctttgggtgaaaagctgttctttcactgctgcttcatgccagcattttagttcgatgttgacgcgcaacaagtgtcttgttgagctccaattgagcaataataaattaggtgattgtggcgtgcagcagctttgccaagggttatctcaaccaggtgcggccctccaggttttgtggttgggcgactgtgatgtaggtcatagtggctgtgcaagcttagcttccgtgttgcttgtcaaccgttccttacgcgaactcgaccttagtaacaactgcatgggcgaagaagggattctccgtttgatggagagcgttgaacaaccgggatgcgtgcttgaacagttggtcctctatgacatctactggtcggaggagatggatcgtcgtttacgtgccttagaagagcgcaaaccgtcattgcgcgtgattttc

SEQ ID NO: 658 - protein, 468 aa, synthetic construct
  REGION 1..468: note = Variant of RNase inhibitor
MHHHHHHGGSGTMSLDIQCQQLSDARWTELLPLLQQAEVVRLDDCGLTESRCKDISSALKANPRLTELSLCTNELGDAGVTLVLQGLQSGTCKIEKLSLQNCCLTKTGCGVLGDMLRSMPTLRALYLNDNPLGDAGLQLLCQGLVDENCHLEKLQVEYCNLTAASCESLASALRAKRHFKELAVSNNELGEAGVRVLCRGLVESPCQLEVLKLENCGLTSASCEDLCRVVASKPSLQELDLGMNKLGDQGIATLCPTLLHPSCQIRVLWLWNCDITTAGCRDLCQVLRAKSSLKELSLAGNALGDEGARLLCESLLEPACQLESLWVKSCSFTAASCQHFSSMLTRNKCLVELQLSNNKLGDCGVQQLCQGLSQPGAALQVLWLGDCDVGHSGCASLASVLLVNRSLRELDLSNNCMGEEGILRLMESVEQPGCVLEQLVLYDIYWSEEMDRRLRALEERKPSLRVIF

SEQ ID NO: 659 - DNA, 1404 bp, synthetic construct
  misc_feature 1..1404: note = Variant of RNase inhibitor
  source 1..1404: mol_type = other DNA
atgcaccatcatcatcatcatggcggtagcggcacgatgtctctggatattcagtgtcaacaattgtcagatgcgcgttggactgaactgttaccgcttctgcaacaggcggaagtggtgcgcctggatgactgcggcctcactgagagtcgctgcaaagacatcagtagtgcactgaaagccaacccaagtttgaccgaattaagcctgtgtacaaatgagctgggtgatgctggagttaccttagtcctgcagggcttgcagtctggcacgtgcaagattgaaaaactgtccctccagaactgttgtctgacgaagaccggttgcggtgtattaggcgacatgcttcgttcaatgcccaccctgcgcgcactgtatctgaatgataacccgttgggcgatgcgggcctccagctgctttgccaggggctggtggacgaaaattgtcacctggagaaactgcaggtggaatactgcaatctcacagcagcctcgtgcgaaagcttggcgagcgctctgcgtgccaaacgtcattttaaagaattagcggtttcgaacaacgaactgggtgaagcaggcgtgcgcgtactttgtcgtgggctggtggagagtccatgccaactggaggttctgaaactggaaaattgtggattgacctctgcctcctgcgaggatctttgtctggtggtcgctagcaaaccaagcctccaggaattggaccttggcatgaacaaattaggtgaccaaggcatcgcaacgttatgcccgaccctgcttcacccttcatgccagattcgtgttttgtggctctggaactgtgatatcaccaccgccggctgccgcgacctctgtcaggtattacgcgcgaagtcgtccctcaaagagctgagtcttgcgggtaatgccttgggagatgaaggcgcacgtctcttgtgcgaatcgttattagaaccggcctgccagctcgaaagcctttgggtgaaaagctgttctttcactgctgcttcatgccagcattttagttcgatgttgacgcgcaacaagtgtcttgttgagctccaattgagcaataataaattaggtgattgtggcgtgcagcagctttgccaagggttatctcaaccaggtgcggccctccaggttttgtggttgggcgactgtgatgtaggtcatagtggctgtgcaagcttagcttccgtgttgcttgtcaaccgttccttacgcgaactcgaccttagtaacaactgcatgggcgaagaagggattctccgtttgatggagagcgttgaacaaccgggatgcgtgcttgaacagttggtcctctatgacatctactggtcggaggagatggatcgtcgtttacgtgccttagaagagcgcaaaccgtcattgcgcgtgattttc

SEQ ID NO: 660 - protein, 468 aa, synthetic construct
  REGION 1..468: note = Variant of RNase inhibitor
MHHHHHHGGSGTMSLDIQCQQLSDARWTELLPLLQQAEVVRLDDCGLTESRCKDISSALKANPSLTELSLCTNELGDAGVTLVLQGLQSGTCKIEKLSLQNCCLTKTGCGVLGDMLRSMPTLRALYLNDNPLGDAGLQLLCQGLVDENCHLEKLQVEYCNLTAASCESLASALRAKRHFKELAVSNNELGEAGVRVLCRGLVESPCQLEVLKLENCGLTSASCEDLCLVVASKPSLQELDLGMNKLGDQGIATLCPTLLHPSCQIRVLWLWNCDITTAGCRDLCQVLRAKSSLKELSLAGNALGDEGARLLCESLLEPACQLESLWVKSCSFTAASCQHFSSMLTRNKCLVELQLSNNKLGDCGVQQLCQGLSQPGAALQVLWLGDCDVGHSGCASLASVLLVNRSLRELDLSNNCMGEEGILRLMESVEQPGCVLEQLVLYDIYWSEEMDRRLRALEERKPSLRVIF

SEQ ID NO: 661 - DNA, 1404 bp, synthetic construct
  misc_feature 1..1404: note = Variant of RNase inhibitor
  source 1..1404: mol_type = other DNA
atgcaccatcatcatcatcatggcggtagcggcacgatgtctctggatattcagtgtcaacaattgtcagatgcgcgttggactgaactgttaccgcttctgcaacagtcggaagtggtgcgcctggatgactgcggcctcactgagagtcgctgcaaagacatcagtagtgcactgaaagccaacccaagtttgaccgaattaagcctgtgtacaaatgagctgggtgatgctggagttaccttagtcctgcagggcttgcagtctggcacgtgcaagattgaaaaactgtccctccagaactgttgtctgacgaagaccggttgcggtgtattaggcgacatgcttcgttcaatgcccaccctgcgcgcactgtatctgaatgataacccgttgggcgatgcgggcctccagctgctttgcagtgggctggtggacgaaaattgtcacctggagaaactgcaggtggaatactgcaatctcacagcagcctcgtgcgaaagcttggcgagcgctctgcgtgccaaacgtcattttaaagaattagcggtttcgaacaacgaactgggtgaagcaggcgtgcgcgtactttgtcgtgggctggtggagagtccatgccaactggaggttctgaaactggaaaattgtggattgacctctgcctcctgcgaggatctttgtcgtgtggtcgctagcaaaccaagcctccaggaattggaccttggcatgaacaaattaggtgaccaaggcatcgcaacgttatgcccgaccctgcttcacccttcatgccagattcgtgttttgtggctctggaactgtgatatcaccaccgccggctgccgcgacctctgtcaggtattacgcgcgaagccgtccctcaaagagctgagtcttgcgggtaatgccttgggagatgaaggcgcacgtctcttgtgcgaatcgttattagaaccgggctgccagctcgaaagcctttgggtgaaaagctgttctttcactgctgcttcatgccagcattttagtgcgatgttgacgcgcaacaagtgtcttgttgagctccaattgagcaataataaattaggtgattgtggcgtgcagcagctttgccaagggttatctcaaccaggtgcggccctccaggttttgtggttgggcgactgtgatgtaggtcatagtggctgtgctagcttagcttccgtgttgcttgtcaaccgttccttacgcgaactcgaccttagtaacaactgcatgggcgaagaagggattctccgtttgatggagagcgttgaacaaccgggatgcgtgcttgaacagttggtcctctatgacatctactggtcggaggagatggatcgtcgtttacgtgccttagaagagcgcaaaccgtcattgcgcgtgattttc

SEQ ID NO: 662 - protein, 468 aa, synthetic construct
  REGION 1..468: note = Variant of RNase inhibitor
MHHHHHHGGSGTMSLDIQCQQLSDARWTELLPLLQQSEVVRLDDCGLTESRCKDISSALKANPSLTELSLCTNELGDAGVTLVLQGLQSGTCKIEKLSLQNCCLTKTGCGVLGDMLRSMPTLRALYLNDNPLGDAGLQLLCSGLVDENCHLEKLQVEYCNLTAASCESLASALRAKRHFKELAVSNNELGEAGVRVLCRGLVESPCQLEVLKLENCGLTSASCEDLCRVVASKPSLQELDLGMNKLGDQGIATLCPTLLHPSCQIRVLWLWNCDITTAGCRDLCQVLRAKPSLKELSLAGNALGDEGARLLCESLLEPGCQLESLWVKSCSFTAASCQHFSAMLTRNKCLVELQLSNNKLGDCGVQQLCQGLSQPGAALQVLWLGDCDVGHSGCASLASVLLVNRSLRELDLSNNCMGEEGILRLMESVEQPGCVLEQLVLYDIYWSEEMDRRLRALEERKPSLRVIF

SEQ ID NO: 663 - DNA, 1404 bp, synthetic construct
  misc_feature 1..1404: note = Variant of RNase inhibitor
  source 1..1404: mol_type = other DNA
atgcaccatcatcatcatcatggcggtagcggcacgatgtctctggatattcagtgtcaacaattgtcagatgcgcgttggactgaactgttaccgcttctgcaacagagcgaagtggtgcgcctggatgactgcggcctcactgagagtcgctgcaaagacatcagtagtgcactgcaagccaacccatcgttgatcgaattaagcctgtgtacaaatgagctgggtgatgctggagttaccttagtcctgcagggcttgcagtctggcacgtgcaagattgaaaaactgtccctccagaactgttgtctgacgaagactggttgcggtgtattaggcgacatgcttcgttcaatgcccaccctgcgcgcactgtatctgaatgataacccgttgggcgatgcgggcctccagctgctttgctccgggctggtggacgaaaattgtcacctggagaaactgcaggtggaatactgcaatctcacagcagcctcgtgcgaaagcttggcgagcgctctgcgtgcctcgcgccattttaaagaattagcggtttcgaacaacgaactgggtgaagcaggcgtgcgcgtactttgtcgtgggctggtggagagtccatgccaactggaggttctgaaactggaaaattgtggattgacctctgcctcctgcgaggatctttgtcgtgtggtcgctagcaaaccaagcctccaggaattggaccttggcatgaacaaattaggtgaccaaggcatcgcaacgttatgcccgaccctgcttcacccttcatgccagattcgtgttttgtggctctggaactgtgatatcaccaccgccggctgccgcgacctctgtcaggtattacgcgcgaagccgtccctcaaagagctgagtcttgcgggtaatgccttgggagatgaaggcgcacgtctcttgtgcgaatcgttattaagtccgggctgccagctcgaaagcctttgggtgaaaagctgttctttcactgctgcttcatgccagcattttagttcgatgttgacgcgcaacaagtgtcttgttgagctccaattgagcaataataaattaggtgattgtggcgtgcagcagctttgccaagggttatctcaaccaggtgcggccctccaggttttgtggttgggcgactgtgatgtaggtcatagtggctgtctgagcttagcttccgtgttgcttgtcaaccgttccttacgcgaactcgaccttagtaacaactgcatgggcgaagaagggattctccgtttgatggagagcgttgaacaaccgggatgcgtgcttgaacagttggtcctctatgacatctactggtcggaggagatggatcgtcgtttacgtgccttagaagagcgcaaaccgtcattgcgcgtgattttc

SEQ ID NO: 664 - protein, 468 aa, synthetic construct
  REGION 1..468: note = Variant of RNase inhibitor
MHHHHHHGGSGTMSLDIQCQQLSDARWTELLPLLQQSEVVRLDDCGLTESRCKDISSALQANPSLIELSLCTNELGDAGVTLVLQGLQSGTCKIEKLSLQNCCLTKTGCGVLGDMLRSMPTLRALYLNDNPLGDAGLQLLCSGLVDENCHLEKLQVEYCNLTAASCESLASALRASRHFKELAVSNNELGEAGVRVLCRGLVESPCQLEVLKLENCGLTSASCEDLCRVVASKPSLQELDLGMNKLGDQGIATLCPTLLHPSCQIRVLWLWNCDITTAGCRDLCQVLRAKPSLKELSLAGNALGDEGARLLCESLLSPGCQLESLWVKSCSFTAASCQHFSSMLTRNKCLVELQLSNNKLGDCGVQQLCQGLSQPGAALQVLWLGDCDVGHSGCLSLASVLLVNRSLRELDLSNNCMGEEGILRLMESVEQPGCVLEQLVLYDIYWSEEMDRRLRALEERKPSLRVIF

SEQ ID NO: 665 - DNA, 1404 bp, synthetic construct
  misc_feature 1..1404: note = Variant of RNase inhibitor
  source 1..1404: mol_type = other DNA
atgcaccatcatcatcatcatggcggtagcggcacgatgtctctggatattcagtgtcaacaattgtcagatgcgcgttggactgaactgttaccgcttctgcaacaggcggaagtggtgcgcctggatgactgcggcctcactgagagtcgctgcaaagacatcagtagtgcactgcaagccaacccaagtttgaccgaattaagcctgtgtacaaatgagctgggtgatgctggagttaccttagtcctgcagggcttgcagtctggcacgtgcaagattgaaaaactgtccctccagaactgttgtctgacgaagactggttgcggtgtattaggcgacatgcttcgttcaatgcccaccctgcgcgcactgtatctgaatgataacccgttgggcgatgcgggcctccagctgctttgctccgggctggtggacgaaaattgtcacctggagaaactgcaggtggaatactgcaatctcacagcagcctcgtgcgaaagcttggcgagcgctctgcgtgccaaaacgcattttaaagaattagcggtttcgaacaacgaactgggtgaagcaggcgtgcgcgtactttgtcgtgggctggtggagagtccatgccaactggaggttctgaaactggaaaattgtggattgacctctgcctcctgcgaggatctttgtctggtggtcgctagcaaaccaagcctccaggaattggaccttggcatgaacaaattaggtgaccaaggcatcgcaacgttatgcccgaccctgcttcacccttcatgccagattcgtgttttgtggctctggaactgtgatatcaccaccgccggctgccgcgacctctgtcaggtattacgcgcgaagccgtccctcaaagagctgagtcttgcgggtaatgccttgggagatgaaggcgcacgtctcttgtgcgaatcgttattagaaccggcctgccagctcgaaagcctttgggtgaaaagctgttctttcactgctgcttcatgccagcattttagttcgatgttgacgcgcaacaagtgtcttgttgagctccaattgagcaataataaattaggtgattgtggcgtgcagcagctttgccaagggttatctcaaccaggtgcggccctccaggttttgtggttgggcgactgtgatgtaggtcatagtggctgtgcaagcttagcttccgtgttgcttgtcaaccgttccttacgcgaactcgaccttagtaacaactgcatgggcgaagaagggattctccgtttgatggagagcgttgaacaaccgggatgcgtgcttgaacagttggtcctctatgacatctactggtcggaggagatggatcgtcgtttacgtgccttagaagagcgcaaaccgtcattgcgcgtgattttc

SEQ ID NO: 666 - protein, 468 aa, synthetic construct
  REGION 1..468: note = Variant of RNase inhibitor
MHHHHHHGGSGTMSLDIQCQQLSDARWTELLPLLQQAEVVRLDDCGLTESRCKDISSALQANPSLTELSLCTNELGDAGVTLVLQGLQSGTCKIEKLSLQNCCLTKTGCGVLGDMLRSMPTLRALYLNDNPLGDAGLQLLCSGLVDENCHLEKLQVEYCNLTAASCESLASALRAKTHFKELAVSNNELGEAGVRVLCRGLVESPCQLEVLKLENCGLTSASCEDLCLVVASKPSLQELDLGMNKLGDQGIATLCPTLLHPSCQIRVLWLWNCDITTAGCRDLCQVLRAKPSLKELSLAGNALGDEGARLLCESLLEPACQLESLWVKSCSFTAASCQHFSSMLTRNKCLVELQLSNNKLGDCGVQQLCQGLSQPGAALQVLWLGDCDVGHSGCASLASVLLVNRSLRELDLSNNCMGEEGILRLMESVEQPGCVLEQLVLYDIYWSEEMDRRLRALEERKPSLRVIF

SEQ ID NO: 667 - DNA, 1404 bp, synthetic construct
  misc_feature 1..1404: note = Variant of RNase inhibitor
  source 1..1404: mol_type = other DNA
atgcaccatcatcatcatcatggcggtagcggcacgatgtctctggatattcagtgtcaacaattgtcagatgcgcgttggactgaactgttaccgcttctgcaacagagcgaagtggtgcgcctggatgactgcggcctcactgagagtcgctgcaaagacatcagtagtgcactgcaagccaacccatcgttgaccgaattaagcctgtgtacaaatgagctgggtgatactggagttaccttagtcctgcagggcttgcagtctggcacgtgcaagattgaaaaactgtccctccagaactgttgtctgacgaagactggttgcggtgtattaggcgacatgcttcgttcaatgcccaccctgcgcgcactgtatctgaatgataacccgttgggcgatgcgggcctccagctgctttgctccgggctggtggacgaaaattgtcacctggagaaactgcaggtggaatactgcaatctcacagcagcctcgtgcgaaagcttggcgagcgctctgcgtgccaaacgccattttaaagaattagcggtttcgaacaacgaactgggtgaagcaggcgtgcgcgtactttgtcgtgggctggtggagagtccatgccaactggaggttctgaaactggaaaattgtggattgacctctgcctcctgcgaggatctttgtcgtgtggtcgctagcaaaccaagcctccaggaattggaccttggcatgaacaaattaggtgaccaaggcatcgcaacgttatgcccgaccctgctttatccttcatgccagattcgtgttttgtggctctggaactgtgatatcaccaccgccggctgccgcgacctctgtcaggtattacgcgcgaagccgtccctcaaagagctgagtcttgcgggtaatgccttgggagatgaaggcgcacgtctcttgtgcgaatcgttattagaaccggcctgccagctcgaaagcctttgggtgaaaagctgttctttcactgctgcttcatgccagcattttagttcgatgttgacgcgcaacaagtgtcttgttgagctccaattgagcaataataaattaggtgattgtggcgtgcagcagctttgccaagggttatctcaaccaggtgcggccctccaggttttgtggttgggcgactgtgatgtaggtcatagtggctgtgcaagcttagcttccgtgttgcttgtcaaccgttccttacgcgaactcgaccttagtaacaactgcatgggcgaagaagggattctccgtttgatggagagcgttgaacaaccgggatgcgtgcttgaacagttggtcctctatgacatctactggtcggaggagatggatcgtcgtttacgtgccttagaagagcgcaaaccgtcattgcgcgtgattttc

SEQ ID NO: 668 - protein, 468 aa, synthetic construct
  REGION 1..468: note = Variant of RNase inhibitor
MHHHHHHGGSGTMSLDIQCQQLSDARWTELLPLLQQSEVVRLDDCGLTESRCKDISSALQANPSLTELSLCTNELGDTGVTLVLQGLQSGTCKIEKLSLQNCCLTKTGCGVLGDMLRSMPTLRALYLNDNPLGDAGLQLLCSGLVDENCHLEKLQVEYCNLTAASCESLASALRAKRHFKELAVSNNELGEAGVRVLCRGLVESPCQLEVLKLENCGLTSASCEDLCRVVASKPSLQELDLGMNKLGDQGIATLCPTLLYPSCQIRVLWLWNCDITTAGCRDLCQVLRAKPSLKELSLAGNALGDEGARLLCESLLEPACQLESLWVKSCSFTAASCQHFSSMLTRNKCLVELQLSNNKLGDCGVQQLCQGLSQPGAALQVLWLGDCDVGHSGCASLASVLLVNRSLRELDLSNNCMGEEGILRLMESVEQPGCVLEQLVLYDIYWSEEMDRRLRALEERKPSLRVIF

SEQ ID NO: 669 - DNA, 1404 bp, synthetic construct
  misc_feature 1..1404: note = Variant of RNase inhibitor
  source 1..1404: mol_type = other DNA
atgcaccatcatcatcatcatggcggtagcggcacgatgtctctggatattcagtgtcaacaattgtcagatgcgcgttggactgaactgttaccgcttctgcaacagagcgaagtggtgcgcctggatgactgcggcctcactgagagtcgctgcaaagacatcagtagtgcactgcaagccaacccatcgttgaccgaattaagcctgtgtacaaatgagctgggtgatgctggagttaccttagtcctgcagggcttgcagtctggcacgtgcaagattgaaaaactgtccctccagaactgttgtctgacgaagactggttgcggtgtattaggcgacatgcttcgttcaatgcccaccctgcgcgcactgtatctgaatgataacccgttgggcgatgcgggcctccagctgctttgctccgggctggtggacgaaaattgtcacctggagaaactgcaggtggaatactgcaatctcacagcagcctcgtgcgaaagcttggcgagcgctctgcgtgccaaacgccattttaaagaattagcggtttcgaacaacgaactgggtgaagcaggcgtgcgcgtactttgtcgtgggctggtggagagtccatgccaactggaggttctgaaactggaaaattgtggattgacctctgcctcctgcgaggatctttgtcgtgtggtcgctagcaaaccaagcctccaggaattggaccttggcatgaacaaattaggtgaccaaggcatcgcaacgttatgcccgaccctgcttcacccttcatgccagattcgtgttttgtggctctggaactgtgatatcaccaccgccggctgccgcgacctctgtcaggtattacgcgcgaagccgtccctcaaagagctgagtcttgcgggtaatgccttgggagatgaaggcgcacgtctcttgtgcgaatcgttattagaaccggcctgccagctcgaaagcctttgggtgaaaagctgttctttcactgctgcttcatgccagcattttagttcgatgttgacgcgcaacaagtgtcttgttgagctccaattgagcaataataaattaggtgattgtggcgtgcagcagctttgccaagggttatctcaaccaggtgcggccctccaggttttgtggttgggcgactgtgatgtaggtcatagtggctgtgcagcgttagcttccgtgttgcttgtcaaccgttccttacgcgaactcgaccttagtaacaactgcatgggcgaagaagggattctccgtttgatggagagcgttgaacaaccgggatgcgtgcttgaacagttggtcctctatgacatctactggtcggaggagatggatcgtcgtttacgtgccttagaagagcgcaaaccgtcattgcgcgtgattttc

SEQ ID NO: 670 - protein, 468 aa, synthetic construct
  REGION 1..468: note = Variant of RNase inhibitor
MHHHHHHGGSGTMSLDIQCQQLSDARWTELLPLLQQSEVVRLDDCGLTESRCKDISSALQANPSLTELSLCTNELGDAGVTLVLQGLQSGTCKIEKLSLQNCCLTKTGCGVLGDMLRSMPTLRALYLNDNPLGDAGLQLLCSGLVDENCHLEKLQVEYCNLTAASCESLASALRAKRHFKELAVSNNELGEAGVRVLCRGLVESPCQLEVLKLENCGLTSASCEDLCRVVASKPSLQELDLGMNKLGDQGIATLCPTLLHPSCQIRVLWLWNCDITTAGCRDLCQVLRAKPSLKELSLAGNALGDEGARLLCESLLEPACQLESLWVKSCSFTAASCQHFSSMLTRNKCLVELQLSNNKLGDCGVQQLCQGLSQPGAALQVLWLGDCDVGHSGCAALASVLLVNRSLRELDLSNNCMGEEGILRLMESVEQPGCVLEQLVLYDIYWSEEMDRRLRALEERKPSLRVIF

SEQ ID NO: 671 - DNA, 1404 bp, synthetic construct
  misc_feature 1..1404: note = Variant of RNase inhibitor
  source 1..1404: mol_type = other DNA
atgcaccatcatcatcatcatggcggtagcggcacgatgtctctggatattcagtgtcaacaattgtcagatgcgcgttggactgaactgttaccgcttctgcaacagagcgaagtggtgcgcctggatgactgcggcctcactgagagtcgctgcaaagacatcagtagtgcactgcaagccaacccatcgttgaccgaattaagcctgtgtacaaatgagctgggtgatgctggagttaccttagtcctgcagggcttgcagtctggcacgtgcaagattgaaaaactgtccctccagaactgttgtctgacgaagactggttgcggtgtattaggcgacatgcttcgttcaatgcccaccctgcgcgcactgtatctgaatgataacccgttgggcgatgcgggcctccagctgctttgctccgggctggtggacgaaaattgtcacctggagaaactgcaggtggaatactgcaatctcacagcagcctcgtgcgaaagcttggcgagcgctctgcgtgccaaacgccattttaaagaattagcggtttcgaacaacgaactgggtgaagcaggcgtgcgcgtactttgtcgtgggctggtggagagtccatgccaactggaggttctgaaactggaaaattgtggattgacctctgcctcctgcgaggatctttgtcgtgtggtcgctagcaaaccaagcctccaggaattggaccttggcatgaacaaattaggtgaccaaggcatcgcaacgttatgcccgaccctgcttcacccttcatgccagattcgtgttttgtggctctggaactgtgatatcaccaccgccggctgccgcgacctctgtcaggtattacgcgcgaagccgtccctcaaagagctgagtcttgcgggtaatgccttgggagatgaaggcgcacgtctcttgtgcgaatcgttattagaaccggcctgccagctcgaaagcctttgggtgaaaagctgttctttcactgctgcttcatgccagcattttagttcgatgttgtctcgcaacaagtgtcttgttgagctccaattgagcaataataaattaggtgattgtggcgtgcagcagctttgccaagggttatctcaaccaggtgcggccctccaggttttgtggttgggcgactgtgatgtaggtcatagtggctgtgcaagcttagcttccgtgttgcttgtcaaccgttccttacgcgaactcgaccttagtaacaactgcatgggcgaagaagggattctccgtttgatggagagcgttgaacaaccgggatgcgtgcttgaacagttggtcctctatgacatctactggtcggaggagatggatcgtcgtttacgtgccttagaagagcgcaaaccgtcattgcgcgtgattttc

SEQ ID NO: 672 - protein, 468 aa, synthetic construct
  REGION 1..468: note = Variant of RNase inhibitor
MHHHHHHGGSGTMSLDIQCQQLSDARWTELLPLLQQSEVVRLDDCGLTESRCKDISSALQANPSLTELSLCTNELGDAGVTLVLQGLQSGTCKIEKLSLQNCCLTKTGCGVLGDMLRSMPTLRALYLNDNPLGDAGLQLLCSGLVDENCHLEKLQVEYCNLTAASCESLASALRAKRHFKELAVSNNELGEAGVRVLCRGLVESPCQLEVLKLENCGLTSASCEDLCRVVASKPSLQELDLGMNKLGDQGIATLCPTLLHPSCQIRVLWLWNCDITTAGCRDLCQVLRAKPSLKELSLAGNALGDEGARLLCESLLEPACQLESLWVKSCSFTAASCQHFSSMLSRNKCLVELQLSNNKLGDCGVQQLCQGLSQPGAALQVLWLGDCDVGHSGCASLASVLLVNRSLRELDLSNNCMGEEGILRLMESVEQPGCVLEQLVLYDIYWSEEMDRRLRALEERKPSLRVIF

SEQ ID NO: 673 - DNA, 1404 bp, synthetic construct; identical to SEQ ID NO: 609
  misc_feature 1..1404: note = Variant of RNase inhibitor
  source 1..1404: mol_type = other DNA

SEQ ID NO: 674 - protein, 468 aa, synthetic construct; identical to SEQ ID NO: 610
  REGION 1..468: note = Variant of RNase inhibitor

SEQ ID NO: 675 - DNA, 1404 bp, synthetic construct
  misc_feature 1..1404: note = Variant of RNase inhibitor
  source 1..1404: mol_type = other DNA
atgcaccatcatcatcatcatggcggtagcggcacgatgtctctggatattcagtgtcaacaattgtcagatgcgcgttggactgaactgttaccgcttctgcaacagagcgaagtggtgcgcctggatgactgcggcctcactgagagtcgctgcaaagacatcagtagtgcactgcaagccaacccatcgttgaccgaattaagcctgtgtacaaatgagctgggtgatgctggagttaccttagtcctgcagggcttgcagtctggcacgtgcaagattgaaaaactgtccctccagaactgttgtctgacgaagactggttgcggtgtattaggcgacatgcttcgttcaatgcccaccctgcgcgcactgtatctgaatgataacccgttgggcgatgcgggcctccagctgctttgctccgggctggtggacgaaaattgtcacctggagaaactgcaggtggaatactgcaatctcacagcagcctcgtgcgaaagcttggcgagcgctctgcgtgccaaacgccattttaaagaattagcggtttcgaacaacgaactgggtgaagcaggcgtgcgcgtactttgtcgtgggctggtggagagtccatgccaactggaggttctgaaactggaaaattgtggattgacctctgcctcctgcgaggatctttgtcgtgtggtcgctagcaaaccaagcctccaggaattggaccttggcatgaacaaattaggtgaccaaggcatcgcaacgttatgcccgaccctgcttcacccttcatgccagattcgtgttttgtggctctggaactgtgatatcaccaccgccggctgccgcgacctctgtcaggtattacgcgcgaagccgtccctcaaagagctgagtcttgcgggtaatgccttgggagatgaaggcgcacgtctcttgtgcgaatcgttattagaaccggcctgccagctcgaaagcctttgggtgaaaagctgttctttcactgctgcttcatgccagcattttagtcatatgttgacgcgcaacaagtgtcttgttgagctccaattgagcaataataaattaggtgattgtggcgtgcagcagctttgccaagggttatctcaaccaggtgcggccctccaggttttgtggttgggcgactgtgatgtaggtcatagtggctgtgcaagcttagcttccgtgttgcttgtcaaccgttccttacgcgaactcgaccttagtaacaactgcatgggcgaagaagggattctccgtttgatggagagcgttgaacaaccgggatgcgtgcttgaacagttggtcctctatgacatctactggtcggaggagatggatcgtcgtttacgtgccttagaagagcgcaaaccgtcattgcgcgtgattttc

SEQ ID NO: 676 - protein, 468 aa, synthetic construct
  REGION 1..468: note = Variant of RNase inhibitor
MHHHHHHGGSGTMSLDIQCQQLSDARWTELLPLLQQSEVVRLDDCGLTESRCKDISSALQANPSLTELSLCTNELGDAGVTLVLQGLQSGTCKIEKLSLQNCCLTKTGCGVLGDMLRSMPTLRALYLNDNPLGDAGLQLLCSGLVDENCHLEKLQVEYCNLTAASCESLASALRAKRHFKELAVSNNELGEAGVRVLCRGLVESPCQLEVLKLENCGLTSASCEDLCRVVASKPSLQELDLGMNKLGDQGIATLCPTLLHPSCQIRVLWLWNCDITTAGCRDLCQVLRAKPSLKELSLAGNALGDEGARLLCESLLEPACQLESLWVKSCSFTAASCQHFSHMLTRNKCLVELQLSNNKLGDCGVQQLCQGLSQPGAALQVLWLGDCDVGHSGCASLASVLLVNRSLRELDLSNNCMGEEGILRLMESVEQPGCVLEQLVLYDIYWSEEMDRRLRALEERKPSLRVIF

SEQ ID NO: 677 - DNA, 1404 bp, synthetic construct
  misc_feature 1..1404: note = Variant of RNase inhibitor
  source 1..1404: mol_type = other DNA
atgcaccatcatcatcatcatggcggtagcggcacgatgtctctggatattcagtgtcaacaattgtcagatgcgcgttggactgaactgttaccgcttctgcaacagagcgaagtggtgcgcctggatgactgcggcctcactgagagtcgctgcaaagacatcagtagtgcactgcaagccaacccatcgttgaccgaattaagcctgtgtacaaatgagctgggtgatgctggagttaccttagtcctgcagggcttgcagtctggcacgtgcaagattgaaaaactgtccctccagaactgttgtctgacgaagactggttgcggtgtattaggcgacatgcttcgttcaatgcccaccctgcgcgcactgtatctgaatgataacccgttgggcgatgcgggcctccagctgctttgctccgggctggtggacgaaaattgtcacctggagaaactgcaggtggaatactgcaatctcacagcagcctcgtgcgaaagcttggcgagcgctctgcgtgccaaacgccattttaaagaattagcggtttcgaacaacgaactgggtgaagcaggcgtgcgcgtactttgtcgtgggctggtggagagtccatgccaactggaggttctgaaactggaaaattgtggattgacctctgcctcctgcgaggatctttgtcgtgtggtcgctagcaaaccaagcctccaggaattggaccttggcatgaacaaattaggtgaccaaggcatcgcaacgttatgcccgaccctgcttcacccttcatgccagattcgtgttttgtggctctggaactgtgatatcaccaccgccggctgccgcgacctctgtcaggtattacgcgcgaagccgtccctcaaagagctgagtcttgcgggtaatgccttgggagatgaaggcgcacgtctcttgtgcgaatcgttattagaaccggcctgccagctcgaaagcctttgggtgaaaagctgttctttcactgctgcttcatgccagcattttagttcgatgttgacgcgcaacaagtgtcttgttgagctccaattgagcaataataaattaggtgattgtggcgtgcagcagctttgccaagggttatctcaaccaggtgcggccctccaggttttgtggttgggcgactgtgatgtaggtcatagtggctgtgttagcttagcttccgtgttgcttgtcaaccgttccttacgcgaactcgaccttagtaacaactgcatgggcgaagaagggattctccgtttgatggagagcgttgaacaaccgggatgcgtgcttgaacagttggtcctctatgacatctactggtcggaggagatggatcgtcgtttacgtgccttagaagagcgcaaaccgtcattgcgcgtgattttc

SEQ ID NO: 678 - protein, 468 aa, synthetic construct
  REGION 1..468: note = Variant of RNase inhibitor
MHHHHHHGGSGTMSLDIQCQQLSDARWTELLPLLQQSEVVRLDDCGLTESRCKDISSALQANPSLTELSLCTNELGDAGVTLVLQGLQSGTCKIEKLSLQNCCLTKTGCGVLGDMLRSMPTLRALYLNDNPLGDAGLQLLCSGLVDENCHLEKLQVEYCNLTAASCESLASALRAKRHFKELAVSNNELGEAGVRVLCRGLVESPCQLEVLKLENCGLTSASCEDLCRVVASKPSLQELDLGMNKLGDQGIATLCPTLLHPSCQIRVLWLWNCDITTAGCRDLCQVLRAKPSLKELSLAGNALGDEGARLLCESLLEPACQLESLWVKSCSFTAASCQHFSSMLTRNKCLVELQLSNNKLGDCGVQQLCQGLSQPGAALQVLWLGDCDVGHSGCVSLASVLLVNRSLRELDLSNNCMGEEGILRLMESVEQPGCVLEQLVLYDIYWSEEMDRRLRALEERKPSLRVIF

SEQ ID NO: 679 - DNA, 1404 bp, synthetic construct
  misc_feature 1..1404: note = Variant of RNase inhibitor
  source 1..1404: mol_type = other DNA
atgcaccatcatcatcatcatggcggtagcggcacgatgtctctggatattcagtgtcaacaattgtcagatgcgcgttggactgaactgttaccgcttctgcaacagagcgaagtggtgcgcctggatgactgcggcctcactgagagtcgctgcaaagacatcagtagtgcactgcaagccaacccatcgttgaccgaattaagcctgtgtacaaatgagctgggtgatgctggagttaccttagtcctgcagggcttgcagtctggcacgtgcaagattgaaaaactgtccctccagaactgttgtctgacgaagactggttgcggtgtattaggcgacatgcttcgttcaatgcccaccctgcgcgcactgtatctgaatgataacccgttgggcgatgcgggcctccagctgctttgctccgggctggtggacgaaaattgtcacctggagaaactgcaggtggaatactgcaatctcacagcagcctcgtgcgaaagcttggcgagcgctctgcgtgccaaacgccattttaaagaattagcggtttcgaacaacgaactgggtgaagcaggcgtgcgcgtactttgtcgtgggctggtggagagtccatgccaactggaggttctgaaactggaaaattgtggattgacctctgcctcctgcgaggatctttgtcgtgtggtcgctagcaaaccaagcctccaggaattggaccttggcatgaacaaattaggtgaccaaggcatcgcaacgttatgcccgaccctgcttcacccttcatgccagattcgtgttttgtggctctggaactgtgatatcaccaccgccggctgccgcgacctctgtcaggtattacgcgcgaagccgtccctcaaagagctgagtcttgcgggtaatgccttgggagatgaaggcgcacgtctcttgtgcgaatcgttattagaaccggcctgccagctcgaaagcctttgggtgaaaagctgttctttcactgctgcttcatgccagcattttagttcgatgttgacgcgcaacaagtgtcttgttgagctccaattgagcaataataaattaggtgattgtggcgtgcaggtgctttgccaagggttatctcaaccaggtgcggccctccaggttttgtggttgggcgactgtgatgtaggtcatagtggctgtgcaagcttagcttccgtgttgcttgtcaaccgttccttacgcgaactcgaccttagtaacaactgcatgggcgaagaagggattctccgtttgatggagagcgttgaacaaccgggatgcgtgcttgaacagttggtcctctatgacatctactggtcggaggagatggatcgtcgtttacgtgccttagaagagcgcaaaccgtcattgcgcgtgattttc

SEQ ID NO: 680 - protein, 468 aa, synthetic construct
  REGION 1..468: note = Variant of RNase inhibitor
MHHHHHHGGSGTMSLDIQCQQLSDARWTELLPLLQQSEVVRLDDCGLTESRCKDISSALQANPSLTELSLCTNELGDAGVTLVLQGLQSGTCKIEKLSLQNCCLTKTGCGVLGDMLRSMPTLRALYLNDNPLGDAGLQLLCSGLVDENCHLEKLQVEYCNLTAASCESLASALRAKRHFKELAVSNNELGEAGVRVLCRGLVESPCQLEVLKLENCGLTSASCEDLCRVVASKPSLQELDLGMNKLGDQGIATLCPTLLHPSCQIRVLWLWNCDITTAGCRDLCQVLRAKPSLKELSLAGNALGDEGARLLCESLLEPACQLESLWVKSCSFTAASCQHFSSMLTRNKCLVELQLSNNKLGDCGVQVLCQGLSQPGAALQVLWLGDCDVGHSGCASLASVLLVNRSLRELDLSNNCMGEEGILRLMESVEQPGCVLEQLVLYDIYWSEEMDRRLRALEERKPSLRVIF

SEQ ID NO: 681 - DNA, 1404 bp, synthetic construct
  misc_feature 1..1404: note = Variant of RNase inhibitor
  source 1..1404: mol_type = other DNA
atgcaccatcatcatcatcatggcggtagcggcacgatgtctctggatattcagtgtcaacaattgtcagatgcgcgttggactgaactgttaccgcttctgcaacagagcgaagtggtgcgcctggatgactgcggcctcactgagagtcgctgcaaagacatcagtagtgcactgcaagccaacccatcgttgaccgaattaagcctgtgtacaaatgagctgggtgatgctggagttaccttagtcctgcagggcttgcagtctggcacgtgcaagattgaaaaactgtccctccagaactgttgtctgacgaagactggttgcggtgtattaggcgacatgcttcgttcaatgcccaccctgcgcgcactgtatctgaatgataacccgttgggcgatgcgggcctccagctgctttgctccgggctggtggacgaaaattgtcacctggagaaactgcaggtggaatactgcaatctcacagcagcctcgtgcgaaagcttggcgagcgctctgcgtgccaaacgccattttaaagaattagcggtttcgaacaacgaactgggtgaagcaggcgtgcgcgtactttgtcgtgggctggtggagagtccatgccaactggaggttctgaaactggaaaattgtggattgacctctgcctcctgcgaggatctttgtcgtgtggtcgctagcaaaccaagcctccaggaattggaccttggcatgaacaaattaggtgaccaaggcatcgcaacgttatgcccgaccctgcttcacccttcatgccagattcgtgttttgtggctctggaactgtgatatcaccaccgccggctgccgcgacctctgtcaggtattacgcgcgaagccgtccctcaaagagctgagtcttgcgggtaatgccttgggagatgaaggcgcacgtctcttgtgcgaatcgttattagaaccggcctgccagctcgaaagcctttgggtgaaaagctgttctttcactgctgcttcatgccagcattttagttcgatgttgacgcgcaacaagtgtcttgttgagctccaattgagcaataataaattaggtgattgtggcgtgcagcagctttgccaagggttatctcaaccaggtgcggccctccaggttttgtggttgggcgactgtgatgtaggtcatagtggctgtctgagcttagcttccgtgttgcttgtcaaccgttccttacgcgaactcgaccttagtaacaactgcatgggcgaagaagggattctccgtttgatggagagcgttgaacaaccgggatgcgtgcttgaacagttggtcctctatgacatctactggtcggaggagatggatcgtcgtttacgtgccttagaagagcgcaaaccgtcattgcgcgtgattttc

SEQ ID NO: 682 - protein, 468 aa, synthetic construct
  REGION 1..468: note = Variant of RNase inhibitor
MHHHHHHGGSGTMSLDIQCQQLSDARWTELLPLLQQSEVVRLDDCGLTESRCKDISSALQANPSLTELSLCTNELGDAGVTLVLQGLQSGTCKIEKLSLQNCCLTKTGCGVLGDMLRSMPTLRALYLNDNPLGDAGLQLLCSGLVDENCHLEKLQVEYCNLTAASCESLASALRAKRHFKELAVSNNELGEAGVRVLCRGLVESPCQLEVLKLENCGLTSASCEDLCRVVASKPSLQELDLGMNKLGDQGIATLCPTLLHPSCQIRVLWLWNCDITTAGCRDLCQVLRAKPSLKELSLAGNALGDEGARLLCESLLEPACQLESLWVKSCSFTAASCQHFSSMLTRNKCLVELQLSNNKLGDCGVQQLCQGLSQPGAALQVLWLGDCDVGHSGCLSLASVLLVNRSLRELDLSNNCMGEEGILRLMESVEQPGCVLEQLVLYDIYWSEEMDRRLRALEERKPSLRVIF

SEQ ID NO: 683 - DNA, 1404 bp, synthetic construct
  misc_feature 1..1404: note = Variant of RNase inhibitor
  source 1..1404: mol_type = other DNA
atgcaccatcatcatcatcatggcggtagcggcacgatgtctctggatattcagtgtcaacaattgtcagatgcgcgttggactgaactgttaccgcttctgcaacagagcgaagtggtgcgcctggatgactgcggcctcactgagagtcgctgcaaagacatcagtagtgcactgcaagccaacccatcgttgaccgaattaagcctgtgtacaaatgagctgggtgatgctggagttaccttagtcctgcagggcttgcagtctggcacgtgcaagattgaaaaactgtccctccagaactgttgtctgacgaagactggttgcggtgtattaggcgacatgcttcgttcaatgcccaccctgcgcgcactgtatctgaatgataacccgttgggcgatgcgggcctccagctgctttgctccgggctggtggacgaaaattgtcacctggagaaactgcaggtggaatactgcaatctcacagcagcctcgtgcgaaagcttggcgagcgctctgcgtgccaaacgccattttaaagaattagcggtttcgaacaacgaactgggtgaagcaggcgtgcgcgtactttgtcgtgggctggtggagagtccatgccaactggaggttctgaaactggaaaattgtggattgacctctgcctcctgcgaggatctttgtcgtgtggtcgctagcaaaccaagcctccaggaattggaccttggcatgaacaaattaggtgaccaaggcatcgcaacgttatgcccgaccctgcttcacccttcatgccagattcgtgttttgtggctctggaactgtgatatcaccaccgccggctgccgcgacctctgtcaggtattacgcgcgaagccgtccctcaaagagctgagtcttgcgggtaatgccttgggagatgaaggcgcacgtctcttgtgcgaatcgttattagaaccggcctgccagctcgaaagcctttgggtgaaaagctgttctttcactgctgcttcatgccagcattttagttcgatgttgacgcgcaacaagtgtcttgttgagctccaattgagcaataataaattaggtgattgtggcgtgcagttgctttgccaagggttatctcaaccaggtgcggccctccaggttttgtggttgggcgactgtgatgtaggtcatagtggctgtgcaagcttagcttccgtgttgcttgtcaaccgttccttacgcgaactcgaccttagtaacaactgcatgggcgaagaagggattctccgtttgatggagagcgttgaacaaccgggatgcgtgcttgaacagttggtcctctatgacatctactggtcggaggagatggatcgtcgtttacgtgccttagaagagcgcaaaccgtcattgcgcgtgattttc

SEQ ID NO: 684 - protein, 468 aa, synthetic construct
  REGION 1..468: note = Variant of RNase inhibitor
MHHHHHHGGSGTMSLDIQCQQLSDARWTELLPLLQQSEVVRLDDCGLTESRCKDISSALQANPSLTELSLCTNELGDAGVTLVLQGLQSGTCKIEKLSLQNCCLTKTGCGVLGDMLRSMPTLRALYLNDNPLGDAGLQLLCSGLVDENCHLEKLQVEYCNLTAASCESLASALRAKRHFKELAVSNNELGEAGVRVLCRGLVESPCQLEVLKLENCGLTSASCEDLCRVVASKPSLQELDLGMNKLGDQGIATLCPTLLHPSCQIRVLWLWNCDITTAGCRDLCQVLRAKPSLKELSLAGNALGDEGARLLCESLLEPACQLESLWVKSCSFTAASCQHFSSMLTRNKCLVELQLSNNKLGDCGVQLLCQGLSQPGAALQVLWLGDCDVGHSGCASLASVLLVNRSLRELDLSNNCMGEEGILRLMESVEQPGCVLEQLVLYDIYWSEEMDRRLRALEERKPSLRVIF

SEQ ID NO: 685 - DNA, 1404 bp, synthetic construct
  misc_feature 1..1404: note = Variant of RNase inhibitor
  source 1..1404: mol_type = other DNA
atgcaccatcatcatcatcatggcggtagcggcacgatgtctctggatattcagtgtcaacaattgtcagatgcgcgttggactgaactgttaccgcttctgcaacagagcgcggtggtgcgcctggatgactgcggcctcactgagagtcgctgcaaagacatcagtagtgcactgcaagccaacccatcgttgaccgaattaagcctgtgtacaaatgagctgggtgatgctggagttaccttagtcctgcagggcttgcagtctggcacgtgcaagattgaaaaactgtccctccagaactgttgtctgacgaagactggttgcggtgtattaggcgacatgcttcgttcaatgcccaccctgcgcgcactgtatctgaatgataacccgttgggcgatgcgggcctccagctgctttgctccgggctggtggacgaaaattgtcacctggagaaactgcaggtggaatactgcaatctcacagcagcctcgtgcgaaagcttggcgagcgctctgcgtgccaaacgccattttaaagaattagcggtttcgaacaacgaactgggtgaagcaggcgtgcgcgtactttgtcgtgggctggtggagagtccatgccaactggaggttctgaaactggaaaattgtggattgacctctgcctcctgcgaggatctttgtcgtgtggtcgctagcaaaccaagcctccaggaattggaccttggcatgaacaaattaggtgaccaaggcatcgcaacgttatgcccgaccctgcttcacccttcatgccagattcgtgttttgtggctctggaactgtgatatcaccaccgccggctgccgcgacctctgtcaggtattacgcgcgaagccgtccctcaaagagctgagtcttgcgggtaatgccttgggagatgaaggcgcacgtctcttgtgcgaatcgttattagaaccggcctgccagctcgaaagcctttgggtgaaaagctgttctttcactgctgcttcatgccagcattttagttcgatgttgacgcgcaacaagtgtcttgttgagctccaattgagcaataataaattaggtgattgtggcgtgcagcagctttgccaagggttatctcaaccaggtgcggccctccaggttttgtggttgggcgactgtgatgtaggtcatagtggctgtgcaagcttagcttccgtgttgcttgtcaaccgttccttacgcgaactcgaccttagtaacaactgcatgggcgaagaagggattctccgtttgatggagagcgttgaacaaccgggatgcgtgcttgaacagttggtcctctatgacatctactggtcggaggagatggatcgtcgtttacgtgccttagaagagcgcaaaccgtcattgcgcgtgattttc

SEQ ID NO: 686 - protein, 468 aa, synthetic construct
  REGION 1..468: note = Variant of RNase inhibitor
MHHHHHHGGSGTMSLDIQCQQLSDARWTELLPLLQQSAVVRLDDCGLTESRCKDISSALQANPSLTELSLCTNELGDAGVTLVLQGLQSGTCKIEKLSLQNCCLTKTGCGVLGDMLRSMPTLRALYLNDNPLGDAGLQLLCSGLVDENCHLEKLQVEYCNLTAASCESLASALRAKRHFKELAVSNNELGEAGVRVLCRGLVESPCQLEVLKLENCGLTSASCEDLCRVVASKPSLQELDLGMNKLGDQGIATLCPTLLHPSCQIRVLWLWNCDITTAGCRDLCQVLRAKPSLKELSLAGNALGDEGARLLCESLLEPACQLESLWVKSCSFTAASCQHFSSMLTRNKCLVELQLSNNKLGDCGVQQLCQGLSQPGAALQVLWLGDCDVGHSGCASLASVLLVNRSLRELDLSNNCMGEEGILRLMESVEQPGCVLEQLVLYDIYWSEEMDRRLRALEERKPSLRVIF

SEQ ID NO: 687 - DNA, 1404 bp, synthetic construct; identical to SEQ ID NO: 653
  misc_feature 1..1404: note = Variant of RNase inhibitor
  source 1..1404: mol_type = other DNA

SEQ ID NO: 688 - protein, 468 aa, synthetic construct; identical to SEQ ID NO: 654
  REGION 1..468: note = Variant of RNase inhibitor

SEQ ID NO: 689 - DNA, 1404 bp, synthetic construct
  misc_feature 1..1404: note = Variant of RNase inhibitor
  source 1..1404: mol_type = other DNA
atgcaccatcatcatcatcatggcggtagcggcacgatgtctctggatattcagtgtcaacaattgtcagatgcgcgttggactgaactgttaccgcttctgcaacagagcgaagtggtgcgcctggatgactgcggcctcactgagagtcgctgcaaagacatcagtagtgcactgcaagccaacccatcgttgaccgaattaagcctgtgtacaaatgagctgggtgatgctggagttaccttagtcctgcagggcttgcagtctggcacgtgcaagattgaaaaactgtccctccagaactgttgtctgacgaagactggttgcggtgtattaggcgacatgcttcgttcaatgcccaccctgcgcgcactgtatctgaatgataacccgttgggcgatgcgggcctccagctgctttgctccgggctggtggacgaaaattgtcacctggagaaactgcaggtggaatactgcaatctcacagcagcctcgtgcgaaagcttggcgagcgctctgcgtgccaaacgccattttaaagaattagcggtttcgaacaacgaactgggtgaagcaggcgtgcgcgtactttgtcgtgggctggtggagagtccatgccaactggaggttctgaaactggaaaattgtggattgacctctgcctcctgcgaggatctttgtaaggtggtcgctagcaaaccaagcctccaggaattggaccttggcatgaacaaattaggtgaccaaggcatcgcaacgttatgcccgaccctgcttcacccttcatgccagattcgtgttttgtggctctggaactgtgatatcaccaccgccggctgccgcgacctctgtcaggtattacgcgcgaagccgtccctcaaagagctgagtcttgcgggtaatgccttgggagatgaaggcgcacgtctcttgtgcgaatcgttattagaaccggcctgccagctcgaaagcctttgggtgaaaagctgttctttcactgctgcttcatgccagcattttagttcgatgttgacgcgcaacaagtgtcttgttgagctccaattgagcaataataaattaggtgattgtggcgtgcagcagctttgccaagggttatctcaaccaggtgcggccctccaggttttgtggttgggcgactgtgatgtaggtcatagtggctgtgcaagcttagcttccgtgttgcttgtcaaccgttccttacgcgaactcgaccttagtaacaactgcatgggcgaagaagggattctccgtttgatggagagcgttgaacaaccgggatgcgtgcttgaacagttggtcctctatgacatctactggtcggaggagatggatcgtcgtttacgtgccttagaagagcgcaaaccgtcattgcgcgtgattttc

SEQ ID NO: 690 - protein, 468 aa, synthetic construct
  REGION 1..468: note = Variant of RNase inhibitor
MHHHHHHGGSGTMSLDIQCQQLSDARWTELLPLLQQSEVVRLDDCGLTESRCKDISSALQANPSLTELSLCTNELGDAGVTLVLQGLQSGTCKIEKLSLQNCCLTKTGCGVLGDMLRSMPTLRALYLNDNPLGDAGLQLLCSGLVDENCHLEKLQVEYCNLTAASCESLASALRAKRHFKELAVSNNELGEAGVRVLCRGLVESPCQLEVLKLENCGLTSASCEDLCKVVASKPSLQELDLGMNKLGDQGIATLCPTLLHPSCQIRVLWLWNCDITTAGCRDLCQVLRAKPSLKELSLAGNALGDEGARLLCESLLEPACQLESLWVKSCSFTAASCQHFSSMLTRNKCLVELQLSNNKLGDCGVQQLCQGLSQPGAALQVLWLGDCDVGHSGCASLASVLLVNRSLRELDLSNNCMGEEGILRLMESVEQPGCVLEQLVLYDIYWSEEMDRRLRALEERKPSLRVIF

SEQ ID NO: 691 - DNA, 1404 bp, synthetic construct
  misc_feature 1..1404: note = Variant of RNase inhibitor
  source 1..1404: mol_type = other DNA
atgcaccatcatcatcatcatggcggtagcggcacgatgtctctggatattcagtgtcaacaattgtcagatgcgcgttggactgaactgttaccgcttctgcaacagagcgaagtggtgcgcctggatgactgcggcctcactgagagtcgctgcaaagacatcagtagtgcactgcaagccaacccatcgttgaccgaattaagcctgtgtacaaatgagctgggtgatgctggagttaccttagtcctgcagggcttgcagtctggcacgtgcaagattgaaaaactgtccctccagaactgttgtctgacgaagactggttgcggtgtattaggcgacatgcttcgttcaatgcccaccctgcgcgcactgtatctgaatgataacccgttgggcgatgcgggcctccagctgctttgctccgggctggtggacgaaaattgtcacctggagaaactgcaggtggaatactgcaatctcacagcagcctcgtgcgaaagcttggcgagcgctctgcgtgccaaacgccattttaaagaattagcggtttcgaacaacgaactgggtgaagcaggcgtgcgcgtactttgtcgtgggctggtggagagtccatgccaactggaggttctgaaactggaaaattgtggattgacctctgcctcctgcgaggatctttgtcgtgtggtcgctagcaaaccaagcctccaggaattggaccttggcatgaacaaattaggtgaccaaggcatcgcaacgttatgcccgaccctgcttttgccttcatgccagattcgtgttttgtggctctggaactgtgatatcaccaccgccggctgccgcgacctctgtcaggtattacgcgcgaagccgtccctcaaagagctgagtcttgcgggtaatgccttgggagatgaaggcgcacgtctcttgtgcgaatcgttattagaaccggcctgccagctcgaaagcctttgggtgaaaagctgttctttcactgctgcttcatgccagcattttagttcgatgttgacgcgcaacaagtgtcttgttgagctccaattgagcaataataaattaggtgattgtggcgtgcagcagctttgccaagggttatctcaaccaggtgcggccctccaggttttgtggttgggcgactgtgatgtaggtcatagtggctgtgcaagcttagcttccgtgttgcttgtcaaccgttccttacgcgaactcgaccttagtaacaactgcatgggcgaagaagggattctccgtttgatggagagcgttgaacaaccgggatgcgtgcttgaacagttggtcctctatgacatctactggtcggaggagatggatcgtcgtttacgtgccttagaagagcgcaaaccgtcattgcgcgtgattttc

SEQ ID NO: 692 - protein, 468 aa, synthetic construct; identical to SEQ ID NO: 612
  REGION 1..468: note = Variant of RNase inhibitor

SEQ ID NO: 693 - DNA, 1404 bp, synthetic construct
  misc_feature 1..1404: note = Variant of RNase inhibitor
  source 1..1404: mol_type = other DNA
atgcaccatcatcatcatcatggcggtagcggcacgatgtctctggatattcagtgtcaacaattgtcagatgcgcgttggactgaactgttaccgcttctgcaacagagcgaagtggtgcgcctggatgactgcggcctcactgagagtcgctgcaaagacatcagtgtggcactgcaagccaacccatcgttgaccgaattaagcctgtgtacaaatgagctgggtgatgctggagttaccttagtcctgcagggcttgcagtctggcacgtgcaagattgaaaaactgtccctccagaactgttgtctgacgaagactggttgcggtgtattaggcgacatgcttcgttcaatgcccaccctgcgcgcactgtatctgaatgataacccgttgggcgatgcgggcctccagctgctttgctccgggctggtggacgaaaattgtcacctggagaaactgcaggtggaatactgcaatctcacagcagcctcgtgcgaaagcttggcgagcgctctgcgtgccaaacgccattttaaagaattagcggtttcgaacaacgaactgggtgaagcaggcgtgcgcgtactttgtcgtgggctggtggagagtccatgccaactggaggttctgaaactggaaaattgtggattgacctctgcctcctgcgaggatctttgtcgtgtggtcgctagcaaaccaagcctccaggaattggaccttggcatgaacaaattaggtgaccaaggcatcgcaacgttatgcccgaccctgcttcacccttcatgccagattcgtgttttgtggctctggaactgtgatatcaccaccgccggctgccgcgacctctgtcaggtattacgcgcgaagccgtccctcaaagagctgagtcttgcgggtaatgccttgggagatgaaggcgcacgtctcttgtgcgaatcgttattagaaccggcctgccagctcgaaagcctttgggtgaaaagctgttctttcactgctgcttcatgccagcattttagttcgatgttgacgcgcaacaagtgtcttgttgagctccaattgagcaataataaattaggtgattgtggcgtgcagcagctttgccaagggttatctcaaccaggtgcggccctccaggttttgtggttgggcgactgtgatgtaggtcatagtggctgtgcaagcttagcttccgtgttgcttgtcaaccgttccttacgcgaactcgaccttagtaacaactgcatgggcgaagaagggattctccgtttgatggagagcgttgaacaaccgggatgcgtgcttgaacagttggtcctctatgacatctactggtcggaggagatggatcgtcgtttacgtgccttagaagagcgcaaaccgtcattgcgcgtgattttc

SEQ ID NO: 694 - protein, 468 aa, synthetic construct
  REGION 1..468: note = Variant of RNase inhibitor
MHHHHHHGGSGTMSLDIQCQQLSDARWTELLPLLQQSEVVRLDDCGLTESRCKDISVALQANPSLTELSLCTNELGDAGVTLVLQGLQSGTCKIEKLSLQNCCLTKTGCGVLGDMLRSMPTLRALYLNDNPLGDAGLQLLCSGLVDENCHLEKLQVEYCNLTAASCESLASALRAKRHFKELAVSNNELGEAGVRVLCRGLVESPCQLEVLKLENCGLTSASCEDLCRVVASKPSLQELDLGMNKLGDQGIATLCPTLLHPSCQIRVLWLWNCDITTAGCRDLCQVLRAKPSLKELSLAGNALGDEGARLLCESLLEPACQLESLWVKSCSFTAASCQHFSSMLTRNKCLVELQLSNNKLGDCGVQQLCQGLSQPGAALQVLWLGDCDVGHSGCASLASVLLVNRSLRELDLSNNCMGEEGILRLMESVEQPGCVLEQLVLYDIYWSEEMDRRLRALEERKPSLRVIF

SEQ ID NO: 695 - DNA, 1404 bp, synthetic construct
  misc_feature 1..1404: note = Variant of RNase inhibitor
  source 1..1404: mol_type = other DNA
atgcaccatcatcatcatcatggcggtagcggcacgatgtctctggatattcagtgtcaacaattgtcagatgcgcgttggactgaactgttaccgcttctgcaacagagcgaagtggtgcgcctggatgactgcggcctcactgagatgcattgcaaagacatcagtagtgcactgcaagccaacccatcgttgaccgaattaagcctgtgtacaaatgagctgggtgatgctggagttaccttagtcctgcagggcttgcagtctggcacgtgcaagattgaaaaactgtccctccagaactgttgtctgacgaagactggttgcggtgtattaggcgacatgcttcgttcaatgcccaccctgcgcgcactgtatctgaatgataacccgttgggcgatgcgggcctccagctgctttgctccgggctggtggacgaaaattgtcacctggagaaactgcaggtggaatactgcaatctcacagcagcctcgtgcgaaagcttggcgagcgctctgcgtgccaaacgccattttaaagaattagcggtttcgaacaacgaactgggtgaagcaggcgtgcgcgtactttgtcgtgggctggtggagagtccatgccaactggaggttctgaaactggaaaattgtggattgacctctgcctcctgcgaggatctttgtcgtgtggtcgctagcaaaccaagcctccaggaattggaccttggcatgaacaaattaggtgaccaaggcatcgcaacgttatgcccgaccctgcttcacccttcatgccagattcgtgttttgtggctctggaactgtgatatcaccaccgccggctgccgcgacctctgtcaggtattacgcgcgaagccgtccctcaaagagctgagtcttgcgggtaatgccttgggagatgaaggcgcacgtctcttgtgcgaatcgttattagaaccggcctgccagctcgaaagcctttgggtgaaaagctgttctttcactgctgcttcatgccagcattttagttcgatgttgacgcgcaacaagtgtcttgttgagctccaattgagcaataataaattaggtgattgtggcgtgcagcagctttgccaagggttatctcaaccaggtgcggccctccaggttttgtggttgggcgactgtgatgtaggtcatagtggctgtgcaagcttagcttccgtgttgcttgtcaaccgttccttacgcgaactcgaccttagtaacaactgcatgggcgaagaagggattctccgtttgatggagagcgttgaacaaccgggatgcgtgcttgaacagttggtcctctatgacatctactggtcggaggagatggatcgtcgtttacgtgccttagaagagcgcaaaccgtcattgcgcgtgattttc

SEQ ID NO: 696 - protein, 468 aa, synthetic construct
  REGION 1..468: note = Variant of RNase inhibitor
MHHHHHHGGSGTMSLDIQCQQLSDARWTELLPLLQQSEVVRLDDCGLTEMHCKDISSALQANPSLTELSLCTNELGDAGVTLVLQGLQSGTCKIEKLSLQNCCLTKTGCGVLGDMLRSMPTLRALYLNDNPLGDAGLQLLCSGLVDENCHLEKLQVEYCNLTAASCESLASALRAKRHFKELAVSNNELGEAGVRVLCRGLVESPCQLEVLKLENCGLTSASCEDLCRVVASKPSLQELDLGMNKLGDQGIATLCPTLLHPSCQIRVLWLWNCDITTAGCRDLCQVLRAKPSLKELSLAGNALGDEGARLLCESLLEPACQLESLWVKSCSFTAASCQHFSSMLTRNKCLVELQLSNNKLGDCGVQQLCQGLSQPGAALQVLWLGDCDVGHSGCASLASVLLVNRSLRELDLSNNCMGEEGILRLMESVEQPGCVLEQLVLYDIYWSEEMDRRLRALEERKPSLRVIF

SEQ ID NO: 697 - DNA, 1404 bp, synthetic construct
  misc_feature 1..1404: note = Variant of RNase inhibitor
  source 1..1404: mol_type = other DNA
atgcaccatcatcatcatcatggcggtagcggcacgatgtctctggatattcagtgtcaacaattgtcagatgcgcgttggactgaactgttaccgcttctgcaacagagcgaagtggtgcgcctggatgactgcggcctcactgagagtcgctgcaaagacatcagtagtgcactgcaagccaacccatcgttgaccgaattaagcctgtgtacaaatgagctgggtgatgctggagttaccttagtcctgcagggcttgcagtctggcacgtgcaagattgaaaaactgtccctccagaactgttgtctgacgaagactggttgcggtgtattaggcgacatgcttcgttcaatgcccaccctgcgcgcactgtatctgaatgataacccgttgggcgatgcgggcctccagctgctttgctccgggctggtggacgaaaattgtcacctggagaaactgcaggtggaatactgcaatctcacagcagcctcgtgcgaaagcttggcgagcgctctgcgtgccaaacgccattttaaagaattagcggtttcgaacaacgaactgggtgaagcaggcgtgcgcgtactttgtcgtgggctggtggagagtccatgccaactggaggttctgaaactggaaaattgtggattgacctctgcctcctgcgaggatctttgtcgtgtggtcgctagcaaaccaagcctccaggaattggaccttggcatgaacaaattaggtgaccaaggcatcgcaacgttatgcccgaccctgcttcacccttcatgccagattcgtgttttgtggctctggaactgtgatatcaccaccgccggctgccgcgacctctgtcaggtattacgcgcgaagccgtccctcaaagagctgagtcttgcgggtaatgccttgggagatgaaggcgcacgtctcttgtgcgaatcgttattagaaccggcctgccagctcgaaagcctttgggtgaaaagctgttctttcactgctgcttcatgcgtgcattttagttcgatgttgacgcgcaacaagtgtcttgttgagctccaattgagcaataataaattaggtgattgtggcgtgcagcagctttgccaagggttatctcaaccaggtgcggccctccaggttttgtggttgggcgactgtgatgtaggtcatagtggctgtgcaagcttagcttccgtgttgcttgtcaaccgttccttacgcgaactcgaccttagtaacaactgcatgggcgaagaagggattctccgtttgatggagagcgttgaacaaccgggatgcgtgcttgaacagttggtcctctatgacatctactggtcggaggagatggatcgtcgtttacgtgccttagaagagcgcaaaccgtcattgcgcgtgattttc

SEQ ID NO: 698 - protein, 468 aa, synthetic construct
  REGION 1..468: note = Variant of RNase inhibitor
MHHHHHHGGSGTMSLDIQCQQLSDARWTELLPLLQQSEVVRLDDCGLTESRCKDISSALQANPSLTELSLCTNELGDAGVTLVLQGLQSGTCKIEKLSLQNCCLTKTGCGVLGDMLRSMPTLRALYLNDNPLGDAGLQLLCSGLVDENCHLEKLQVEYCNLTAASCESLASALRAKRHFKELAVSNNELGEAGVRVLCRGLVESPCQLEVLKLENCGLTSASCEDLCRVVASKPSLQELDLGMNKLGDQGIATLCPTLLHPSCQIRVLWLWNCDITTAGCRDLCQVLRAKPSLKELSLAGNALGDEGARLLCESLLEPACQLESLWVKSCSFTAASCVHFSSMLTRNKCLVELQLSNNKLGDCGVQQLCQGLSQPGAALQVLWLGDCDVGHSGCASLASVLLVNRSLRELDLSNNCMGEEGILRLMESVEQPGCVLEQLVLYDIYWSEEMDRRLRALEERKPSLRVIF

SEQ ID NO: 699 - DNA, 1404 bp, synthetic construct
  misc_feature 1..1404: note = Variant of RNase inhibitor
  source 1..1404: mol_type = other DNA
atgcaccatcatcatcatcatggcggtagcggcacgatgtctctggatattcagtgtcaacaattgtcagatgcgcgttggactgaactgttaccgcttctgcaacagagcgaagtggtgcgcctggatgactgcggcctcactgagagtcgctgcaaagacatcagtagtgcactgcaagccaacccatcgttgaccgaattaagcctgtgtacaaatgagctgggtgatgctggagttaccttagtcctgcagggcttgcagtctggcacgtgcaagattgaaaaactgtccctccagaactgttgtctgacgaagactggttgcggtgtattaggcgacatgcttcgttcaatgcccaccctgcgcgcactgtatctgaatgataacccgttgggcgatgcgggcctccagctgctttgctccgggctggtggacgaaaattgtcacctggagaaactgcaggtggaatactgcaatctcacagcagcctcgtgcgaaagcttggcgagcgctctgcgtgccaaacgccattttaaagaattagcggtttcgaacaacgaactgggtgaagcaggcgtgcgcgtactttgtcgtgggctggtggagagtccatgccaactggaggttctgaaactggaaaattgtggattgacctctgcctcctgcgaggatctttgtcgtgtggtcgctagcaaaccaagcctccaggaattggaccttggcatgaacaaattaggtgaccaaggcatcgcaacgttatgcccgaccctgcttcacccttcatgccagattcgtgttttgtggctctggaactgtgatatcaccaccgccggctgccgcgacctctgtcgtgtattacgcgcgaaggagtccctcaaagagctgagtcttgcgggtaatgccttgggagatgaaggcgcacgtctcttgtgcgaatcgttattagaaccggcctgccagctcgaaagcctttgggtgaaaagctgttctttcactgctgcttcatgccagcattttagttcgatgttgacgcgcaacaagtgtcttgttgagctccaattgagcaataataaattaggtgattgtggcgtgcagcagctttgccaagggttatctcaaccaggtgcggccctccaggttttgtggttggccgactgtgatgtaggtcatagtggctgtgcaagcttagcttccgtgttgcttgtcaaccgttccttacgcgaactcgaccttagtaacaactgcatgggcgaagaagggattctccgtttgatggagagcgttgaacaaccgggatgcgtgcttgaacagttggtcctctatgacatctactggtcggaggagatggatcgtcgtttacgtgccttagaagagcgcaaaccgtcattgcgcgtgattttc

SEQ ID NO: 700 - protein, 468 aa, synthetic construct
  REGION 1..468: note = Variant of RNase inhibitor
MHHHHHHGGSGTMSLDIQCQQLSDARWTELLPLLQQSEVVRLDDCGLTESRCKDISSALQANPSLTELSLCTNELGDAGVTLVLQGLQSGTCKIEKLSLQNCCLTKTGCGVLGDMLRSMPTLRALYLNDNPLGDAGLQLLCSGLVDENCHLEKLQVEYCNLTAASCESLASALRAKRHFKELAVSNNELGEAGVRVLCRGLVESPCQLEVLKLENCGLTSASCEDLCRVVASKPSLQELDLGMNKLGDQGIATLCPTLLHPSCQIRVLWLWNCDITTAGCRDLCRVLRAKESLKELSLAGNALGDEGARLLCESLLEPACQLESLWVKSCSFTAASCQHFSSMLTRNKCLVELQLSNNKLGDCGVQQLCQGLSQPGAALQVLWLADCDVGHSGCASLASVLLVNRSLRELDLSNNCMGEEGILRLMESVEQPGCVLEQLVLYDIYWSEEMDRRLRALEERKPSLRVIF

SEQ ID NO: 701 - DNA, 1404 bp, synthetic construct
  misc_feature 1..1404: note = Variant of RNase inhibitor
  source 1..1404: mol_type = other DNA
atgcaccatcatcatcatcatggcggtagcggcacgatgtctctggatattcagtgtcaacaattgtcagatgcgcgttggactgaactgttaccgcttctgcaacagagcgaagtggtgcgcctggatgactgcggcctcactgagagtcgctgcaaagacatcagtagtgcactgcaagccaacccatcgttgaccgaattaagcctgtgtacaaatgagctgggtgatgctggagttaccttagtcctgcagggcttgcagtctggcacgtgcaagattgaaaaactgtccctccagaactgttgtctgacgaagactggttgcggtgtattaggcgacatgcttcgttcaatgcccaccctgcgcgcactgtatctgaatgataacccgttgggcgatgcgggcctccagctgctttgctccgggctggtggacgaaaattgtcacctggagaaactgcaggtggaatactgcaatctcacagcagcctcgtgcgaaagcttggcgagcgctctgcgttttaaacgccattttaaagaattagcggtttcgaacaacgaactgggtgaagcaggcgtgcgcgtactttgtcgtgggctggtggagagtccatgccaactggaggttctgaaactggaaaattgtggattgacctctgcctcctgcgaggatctttgtcgtgtggtcgctagcaaaccaagcctccaggaattggaccttggcatgaacaaattaggtgaccaaggcatcgcaacgttatgcccgaccctgcttcacccttcatgccagattcgtgttttgtggctctggaactgtgatatcaccaccgccggctgccgcgacctctgtcaggtattacgcgcgaagccgtccctcaaagagctgagtcttgcgggtaatgccttgggagatgaaggcgcacgtctcttgtgcgaatcgttattagaaccggcctgccagctcgaaagcctttgggtgaaaagctgttctttcactgctgcttcatgccagcattttagttcgatgttgacgcgcaacaagtgtcttgttgagctccaattgagcaataataaattaggtgattgtggcgtgcagcagctttgccaagggttatctcaaccaggtgcggccctccaggttttgtggttgggcgactgtgatgtaggtcatagtggctgtgcaagcttagcttccgtgttgcttgtcaaccgttccttacgcgaactcgaccttagtaacaactgcatgggcgaagaagggattctccgtttgatggagagcgttgaacaaccgggatgcgtgcttgaacagttggtcctctatgacatctactggtcggaggagatggatcgtcgtttacgtgccttagaagagcgcaaaccgtcattgcgcgtgattttc

SEQ ID NO: 702 - protein, 468 aa, synthetic construct
  REGION 1..468: note = Variant of RNase inhibitor
MHHHHHHGGSGTMSLDIQCQQLSDARWTELLPLLQQSEVVRLDDCGLTESRCKDISSALQANPSLTELSLCTNELGDAGVTLVLQGLQSGTCKIEKLSLQNCCLTKTGCGVLGDMLRSMPTLRALYLNDNPLGDAGLQLLCSGLVDENCHLEKLQVEYCNLTAASCESLASALRFKRHFKELAVSNNELGEAGVRVLCRGLVESPCQLEVLKLENCGLTSASCEDLCRVVASKPSLQELDLGMNKLGDQGIATLCPTLLHPSCQIRVLWLWNCDITTAGCRDLCQVLRAKPSLKELSLAGNALGDEGARLLCESLLEPACQLESLWVKSCSFTAASCQHFSSMLTRNKCLVELQLSNNKLGDCGVQQLCQGLSQPGAALQVLWLGDCDVGHSGCASLASVLLVNRSLRELDLSNNCMGEEGILRLMESVEQPGCVLEQLVLYDIYWSEEMDRRLRALEERKPSLRVIF

SEQ ID NO: 703 - DNA, 1404 bp, synthetic construct
  misc_feature 1..1404: note = Variant of RNase inhibitor
  source 1..1404: mol_type = other DNA
atgcaccatcatcatcatcatggcggtagcggcacgatgtctctggatattcagtgtcaacaattgtcagatgcgcgttggactgaactgttaccgcttctgcaacagagcgaagtggtgcgcctggatgactgcggcctcactgagagtcgctgcaaagacatcagtagtgcactgaaggccaacccatcgttgaccgaattaagcctgtgtacaaatgagctgggtgatgctggagttaccttagtcctgcagggcttgcagtctggcacgtgcaagattgaaaaactgtccctccagaactgttgtctgacgaagactggttgcggtgtattaggcgacatgcttcgttcaatgcccaccctgcgcgcactgtatctgaatgataacccgttgggcgatgcgggcctccagctgctttgctccgggctggtggacgaaaattgtcacctggagaaactgcaggtggaatactgcaatctcacagcagcctcgtgcgaaagcttggcgagcgctctgcgtgccaaacgccattttaaagaattagcggtttcgaacaacgaactgggtgaagcaggcgtgcgcgtactttgtcgtgggctggtggagagtccatgccaactggaggttctgaaactggaaaattgtggattgacctctgcctcctgcgaggatctttgtcgtgtggtcgctagcaaaccaagcctccaggaattggaccttggcatgaacaaattaggtgaccaaggcatcgcaacgttatgcccgaccctgcttcacccttcatgccagattcgtgttttgtggctctggaactgtgatatcaccaccgccggctgccgcgacctctgtcaggtattacgcgcgaagccgtccctcaaagagctgagtcttgcgggtaatgccttgggagatgaaggcgcacgtctcttgtgcgaatcgttattagaaccggcctgccagctcgaaagcctttgggtgaaaagctgttctttcactgctgcttcatgccagcattttagttcgatgttgacgcgcaacaagtgtcttgttgagctccaattgagcaataataaattaggtgattgtggcgtgcagcagctttgccaagggttatctcaaccaggtgcggccctccaggttttgtggttgggcgactgtgatgtaggtcatagtggctgtgcaagcttagcttccgtgttgcttgtcaaccgttccttacgcgaactcgaccttagtaacaactgcatgggcgaagaagggattctccgtttgatggagagcgttgaacaaccgggatgcgtgcttgaacagttggtcctctatgacatctactggtcggaggagatggatcgtcgtttacgtgccttagaagagcgcaaaccgtcattgcgcgtgattttc

SEQ ID NO: 704 - protein, 468 aa, synthetic construct
  REGION 1..468: note = Variant of RNase inhibitor
MHHHHHHGGSGTMSLDIQCQQLSDARWTELLPLLQQSEVVRLDDCGLTESRCKDISSALKANPSLTELSLCTNELGDAGVTLVLQGLQSGTCKIEKLSLQNCCLTKTGCGVLGDMLRSMPTLRALYLNDNPLGDAGLQLLCSGLVDENCHLEKLQVEYCNLTAASCESLASALRAKRHFKELAVSNNELGEAGVRVLCRGLVESPCQLEVLKLENCGLTSASCEDLCRVVASKPSLQELDLGMNKLGDQGIATLCPTLLHPSCQIRVLWLWNCDITTAGCRDLCQVLRAKPSLKELSLAGNALGDEGARLLCESLLEPACQLESLWVKSCSFTAASCQHFSSMLTRNKCLVELQLSNNKLGDCGVQQLCQGLSQPGAALQVLWLGDCDVGHSGCASLASVLLVNRSLRELDLSNNCMGEEGILRLMESVEQPGCVLEQLVLYDIYWSEEMDRRLRALEERKPSLRVIF

SEQ ID NO: 705 - DNA, 1404 bp, synthetic construct
  misc_feature 1..1404: note = Variant of RNase inhibitor
  source 1..1404: mol_type = other DNA
atgcaccatcatcatcatcatggcggtagcggcacgatgtctctggatattcagtgtcaacaattgtcagatgcgcgttggactgaactgttaccgcttctgcaacagagcgaagtggtgcgcctggatgactgcggcctcactgagagtcgctgcaaagacatcagtagtgcactgcaagccaacccatcgttgaccgaattaagcctgtgtacaaatgagctgggtgatgctggagttaccttagtcctgcagggcttgcagtctggcacgtgcaagattgaaaaactgtccctccagaactgttgtctgacgaagactggttgcggtgtattaggcgacatgcttcgttcaatgcccaccctgcgcgcactgtatctgaatgataacccgttgggcgatgcgggcctccagctgctttgctccgggctggtggacgaaaattgtcacctggagaaactgcaggtggaatactgcaatctcacagcagcctcgtgcgaaagcttggcgagcgctctgcgtgccaaacgccattttaaagaattagcggtttcgaacaacgaactgggtgaagcaggcgtgcgcgtactttgtcgtgggctggtggagagtccatgccaactggaggttctgaaactggaaaattgtggattgacctctgcctcctgcgaggatctttgtcaggtggtcgctagcaaaccaagcctccaggaattggaccttggcatgaacaaattaggtgaccaaggcatcgcaacgttatgcccgaccctgcttcacccttcatgccagattcgtgttttgtggctctggaactgtgatatcaccaccgccggctgccgcgacctctgtcaggtattacgcgcgaagccgtccctcaaagagctgagtcttgcgggtaatgccttgggagatgaaggcgcacgtctcttgtgcgaatcgttattagaaccggcctgccagctcgaaagcctttgggtgaaaagctgttctttcactgctgcttcatgccagcattttagttcgatgttgacgcgcaacaagtgtcttgttgagctccaattgagcaataataaattaggtgattgtggcgtgcagcagctttgccaagggttatctcaaccaggtgcggccctccaggttttgtggttgggcgactgtgatgtaggtcatagtggctgtgcaagcttagcttccgtgttgcttgtcaaccgttccttacgcgaactcgaccttagtaacaactgcatgggcgaagaagggattctccgtttgatggagagcgttgaacaaccgggatgcgtgcttgaacagttggtcctctatgacatctactggtcggaggagatggatcgtcgtttacgtgccttagaagagcgcaaaccgtcattgcgcgtgattttc

SEQ ID NO: 706 - protein, 468 aa, synthetic construct
  REGION 1..468: note = Variant of RNase inhibitor
MHHHHHHGGSGTMSLDIQCQQLSDARWTELLPLLQQSEVVRLDDCGLTESRCKDISSALQANPSLTELSLCTNELGDAGVTLVLQGLQSGTCKIEKLSLQNCCLTKTGCGVLGDMLRSMPTLRALYLNDNPLGDAGLQLLCSGLVDENCHLEKLQVEYCNLTAASCESLASALRAKRHFKELAVSNNELGEAGVRVLCRGLVESPCQLEVLKLENCGLTSASCEDLCQVVASKPSLQELDLGMNKLGDQGIATLCPTLLHPSCQIRVLWLWNCDITTAGCRDLCQVLRAKPSLKELSLAGNALGDEGARLLCESLLEPACQLESLWVKSCSFTAASCQHFSSMLTRNKCLVELQLSNNKLGDCGVQQLCQGLSQPGAALQVLWLGDCDVGHSGCASLASVLLVNRSLRELDLSNNCMGEEGILRLMESVEQPGCVLEQLVLYDIYWSEEMDRRLRALEERKPSLRVIF

SEQ ID NO: 707 - DNA, 1404 bp, synthetic construct
  misc_feature 1..1404: note = Variant of RNase inhibitor
  source 1..1404: mol_type = other DNA
atgcaccatcatcatcatcatggcggtagcggcacgatgtctctggatattcagtgtcaacaattgtcagatgcgcgttggactgaactgttaccgcttctgcaacagagcgaagtggtgcgcctggatgactgcggcctcactgagagtcgctgcaaagacatcagtagtgcactgcaagccaacccatcgttgaccgaattaagcctgtgtacaaatgagctgggtgatgctggagttaccttagtcctgcagggcttgcagtctggcacgtgcaagattgaaaaactgtccctccagaactgttgtctgacgaagactggttgcggtgtattaggcgacatgcttcgttcaatgcccaccctgcgcgcactgtatctgaatgataacccgttgggcgatgcgggcctccagctgctttgctccgggctgtcggacccgcaatgtcacctggagaaactgcaggtggaatactgcaatctcacagcagcctcgtgcgaaagcttggcgagcgctctgcgtgccaaacgccattttaaagaattagcggtttcgaacaacgaactgggtgaagcaggcgtgcgcgtactttgtcgtgggctggtggagagtccatgccaactggaggttctgaaactggaaaattgtggattgacctctgcctcctgcgaggatctttgtcgtgtggtcgctagcaaaccaagcctccaggaattggaccttggcatgaacaaattaggtgaccaaggcatcgcaacgttatgcccgaccctgcttcacccttcatgccagattcgtgttttgtggctctggaactgtgatatcaccaccgccggctgccgcgacctctgtcaggtattacgcgcgaagccgtccctcaaagagctgagtcttgcgggtaatgccttgggagatgaaggcgcacgtctcttgtgcgaatcgttattagaaccggcctgccagctcgaaagcctttgggtgaaaagctgttctttcactgctgcttcatgccagcattttagttcgatgttgacgcgcaacaagtgtcttgttgagctccaattgagcaataataaattaggtgattgtggcgtgcagcagctttgccaagggttatctcaaccaggtgcggccctccaggttttgtggttgggcgactgtgatgtaggtcatagtggctgtgcaagcttagcttccgtgttgcttgtcaaccgttccttacgcgaactcgaccttagtaacaactgcatgggcgaagaagggattctccgtttgatggagagcgttgaacaaccgggatgcgtgcttgaacagttggtcctctatgacatctactggtcggaggagatggatcgtcgtttacgtgccttagaagagcgcaaaccgtcattgcgcgtgattttc

SEQ ID NO: 708 - protein, 468 aa, synthetic construct
  REGION 1..468: note = Variant of RNase inhibitor
MHHHHHHGGSGTMSLDIQCQQLSDARWTELLPLLQQSEVVRLDDCGLTESRCKDISSALQANPSLTELSLCTNELGDAGVTLVLQGLQSGTCKIEKLSLQNCCLTKTGCGVLGDMLRSMPTLRALYLNDNPLGDAGLQLLCSGLSDPQCHLEKLQVEYCNLTAASCESLASALRAKRHFKELAVSNNELGEAGVRVLCRGLVESPCQLEVLKLENCGLTSASCEDLCRVVASKPSLQELDLGMNKLGDQGIATLCPTLLHPSCQIRVLWLWNCDITTAGCRDLCQVLRAKPSLKELSLAGNALGDEGARLLCESLLEPACQLESLWVKSCSFTAASCQHFSSMLTRNKCLVELQLSNNKLGDCGVQQLCQGLSQPGAALQVLWLGDCDVGHSGCASLASVLLVNRSLRELDLSNNCMGEEGILRLMESVEQPGCVLEQLVLYDIYWSEEMDRRLRALEERKPSLRVIF

SEQ ID NO: 709 - DNA, 1404 bp, synthetic construct
  misc_feature 1..1404: note = Variant of RNase inhibitor
  source 1..1404: mol_type = other DNA
atgcaccatcatcatcatcatggcggtagcggcacgatgtctctggatattcagtgtcaacaattgtcagatgcgcgttggactgaactgttaccgcttctgcaacagagcgaagtggtgcgcctggatgactgcggcctcactgagagtcgctgcaaagacatcagtagtgcactgcaagccaacccatcgttgaccgaattaagcctgtgtacaaatgagctgggtgatgctggagttaccttagtcctgcagggcttgcagtctggcacgtgcaagattgaaaaactgtccctccagaactgttgtctgacgaagactggttgcggtgtattaggcgacatgcttcgttcaatgcccaccctgcgcgcactgtatctgaatgataacccgttgggcgatgcgggcctccagctgctttgctccgggctggtggacgaaaattgtcacctggagaaactgcaggtggaatactgcaatctcacagcagcctcgtgcgaaagcttggcgagcgctctgcgtgccaaacgccattttaaagaattagcggtttcgaacaacgaactgggtgaagcaggcgtgcgcgtactttgtcgtgggctggtggagagtccatgccaactggaggttctgaaactggaaaattgtggattgacctctgcctcctgcgaggatctttgtcgtgtggtcgctagcaaaccaagcctccaggaattggaccttggcatgaacaaattaggtgaccaaggcatcgcaacgttatgcccgaccctgcttcacccttcatgccagattcgtgttttgtggctctggaactgtgatatcaccaccgccggctgccgcgacctctgtcaggtattacgcgcgaagccgtccctcaaagagctgagtcttgcgggtaatgccttgggagatgaaggcgcacgtctcttgtgcgaatcgttattagaaccggcctgccagctcgaaagcctttgggtgaaaagctgttctttcactgctgcttcatgccagcattttagttcgatgttgacgcgcaacaagtgtcttgttgagctccaattgagcaataataaattaggtgattgtggcgtgcagcagctttgccaagggttatctcaaccaggtgcggccctccaggttttgtggttgggcgactgtgatgtaggtcatagtggctgtatgagcttagcttccgtgttgcttgtcaaccgttccttacgcgaactcgaccttagtaacaactgcatgggcgaagaagggattctccgtttgatggagagcgttgaacaaccgggatgcgtgcttgaacagttggtcctctatgacatctactggtcggaggagatggatcgtcgtttacgtgccttagaagagcgcaaaccgtcattgcgcgtgattttc

SEQ ID NO: 710 - protein, 468 aa, synthetic construct
  REGION 1..468: note = Variant of RNase inhibitor
MHHHHHHGGSGTMSLDIQCQQLSDARWTELLPLLQQSEVVRLDDCGLTESRCKDISSALQANPSLTELSLCTNELGDAGVTLVLQGLQSGTCKIEKLSLQNCCLTKTGCGVLGDMLRSMPTLRALYLNDNPLGDAGLQLLCSGLVDENCHLEKLQVEYCNLTAASCESLASALRAKRHFKELAVSNNELGEAGVRVLCRGLVESPCQLEVLKLENCGLTSASCEDLCRVVASKPSLQELDLGMNKLGDQGIATLCPTLLHPSCQIRVLWLWNCDITTAGCRDLCQVLRAKPSLKELSLAGNALGDEGARLLCESLLEPACQLESLWVKSCSFTAASCQHFSSMLTRNKCLVELQLSNNKLGDCGVQQLCQGLSQPGAALQVLWLGDCDVGHSGCMSLASVLLVNRSLRELDLSNNCMGEEGILRLMESVEQPGCVLEQLVLYDIYWSEEMDRRLRALEERKPSLRVIF

SEQ ID NO: 711 - DNA, 1404 bp, synthetic construct
  misc_feature 1..1404: note = Variant of RNase inhibitor
  source 1..1404: mol_type = other DNA
atgcaccatcatcatcatcatggcggtagcggcacgatgtctctggatattcagtgtcaacaattgtcagatgcgcgttggactgaactgttaccgcttctgcaacagagcgaagtggtgcgcctggatgactgcggcctcactgagagtcgctgcaaagacatcagtagtgcactgtcggccaacccatcgttgaccgaattaagcctgtgtacaaatgagctgggtgatgctggagttaccttagtcctgcagggcttgcagtctggcacgtgcaagattgaaaaactgtccctccagaactgttgtctgacgaagactggttgcggtgtattaggcgacatgcttcgttcaatgcccaccctgcgcgcactgtatctgaatgataacccgttgggcgatgcgggcctccagctgctttgctccgggctggtggacgaaaattgtcacctggagaaactgcaggtggaatactgcaatctcacagcagcctcgtgcgaaagcttggcgagcgctctgcgtgccaaacgccattttaaagaattagcggtttcgaacaacgaactgggtgaagcaggcgtgcgcgtactttgtcgtgggctggtggagagtccatgccaactggaggttctgaaactggaaaattgtggattgacctctgcctcctgcgaggatctttgtcgtgtggtcgctagcaaaccaagcctccaggaattggaccttggcatgaacaaattaggtgaccaaggcatcgcaacgttatgcccgaccctgcttcacccttcatgccagattcgtgttttgtggctctggaactgtgatatcaccaccgccggctgccgcgacctctgtcaggtattacgcgcgaagccgtccctcaaagagctgagtcttgcgggtaatgccttgggagatgaaggcgcacgtctcttgtgcgaatcgttattagaaccggcctgccagctcgaaagcctttgggtgaaaagctgttctttcactgctgcttcatgccagcattttagttcgatgttgacgcgcaacaagtgtcttgttgagctccaattgagcaataataaattaggtgattgtggcgtgcagcagctttgccaagggttatctcaaccaggtgcggccctccaggttttgtggttgggcgactgtgatgtaggtcatagtggctgtgcaagcttagcttccgtgttgcttgtcaaccgttccttacgcgaactcgaccttagtaacaactgcatgggcgaagaagggattctccgtttgatggagagcgttgaacaaccgggatgcgtgcttgaacagttggtcctctatgacatctactggtcggaggagatggatcgtcgtttacgtgccttagaagagcgcaaaccgtcattgcgcgtgattttc

SEQ ID NO: 712 - protein, 468 aa, synthetic construct
  REGION 1..468: note = Variant of RNase inhibitor
MHHHHHHGGSGTMSLDIQCQQLSDARWTELLPLLQQSEVVRLDDCGLTESRCKDISSALSANPSLTELSLCTNELGDAGVTLVLQGLQSGTCKIEKLSLQNCCLTKTGCGVLGDMLRSMPTLRALYLNDNPLGDAGLQLLCSGLVDENCHLEKLQVEYCNLTAASCESLASALRAKRHFKELAVSNNELGEAGVRVLCRGLVESPCQLEVLKLENCGLTSASCEDLCRVVASKPSLQELDLGMNKLGDQGIATLCPTLLHPSCQIRVLWLWNCDITTAGCRDLCQVLRAKPSLKELSLAGNALGDEGARLLCESLLEPACQLESLWVKSCSFTAASCQHFSSMLTRNKCLVELQLSNNKLGDCGVQQLCQGLSQPGAALQVLWLGDCDVGHSGCASLASVLLVNRSLRELDLSNNCMGEEGILRLMESVEQPGCVLEQLVLYDIYWSEEMDRRLRALEERKPSLRVIF

SEQ ID NO: 713 - DNA, 1404 bp, synthetic construct
  misc_feature 1..1404: note = Variant of RNase inhibitor
  source 1..1404: mol_type = other DNA
atgcaccatcatcatcatcatggcggtagcggcacgatgtctctggatattcagtgtcaacaattgtcagatgcgcgttggactgaactgttaccgcttctgcaacagagcgaagtggtgcgcctggatgactgcggcctcactgagagtcgctgcaaagacatcagtagtgcactgcaagccaacccatcgttgaccgaattaagcctgtgtacaaatgagctgggtgatgctggagttaccttagtcctgcagggcttgcagtctggcacgtgcaagattgaaaaactgtccctccagaactgttgtctgacgaagactggttgcggtgtattaggcgacatgcttcgttcaatgcccaccctgcgcgcactgtatctgaatgataacccgttgggcgatgcgggcctccagctgctttgctccgggctggtggacgaaaattgtcacctggagaaactgcaggtggaatactgcaatctcacagcagcctcgtgcgaaagcttggcgagcgctctgcgtgccaaagtgcattttaaagaattagcggtttcgaacaacgaactgggtgaagcaggcgtgcgcgtactttgtcgtgggctggtggagagtccatgccaactggaggttctgaaactggaaaattgtggattgacctctgcctcctgcgaggatctttgtcgtgtggtcgctagcaaaccaagcctccaggaattggaccttggcatgaacaaattaggtgaccaaggcatcgcaacgttatgcccgaccctgcttcacccttcatgccagattcgtgttttgtggctctggaactgtgatatcaccaccgccggctgccgcgacctctgtcaggtattacgcgcgaagccgtccctcaaagagctgagtcttgcgggtaatgccttgggagatgaaggcgcacgtctcttgtgcgaatcgttattagaaccggcctgccagctcgaaagcctttgggtgaaaagctgttctttcactgctgcttcatgccagcattttagttcgatgttgacgcgcaacaagtgtcttgttgagctccaattgagcaataataaattaggtgattgtggcgtgcagcagctttgccaagggttatctcaaccaggtgcggccctccaggttttgtggttgggcgactgtgatgtaggtcatagtggctgtgcaagcttagcttccgtgttgcttgtcaaccgttccttacgcgaactcgaccttagtaacaactgcatgggcgaagaagggattctccgtttgatggagagcgttgaacaaccgggatgcgtgcttgaacagttggtcctctatgacatctactggtcggaggagatggatcgtcgtttacgtgccttagaagagcgcaaaccgtcattgcgcgtgattttc

SEQ ID NO: 714 - protein, 468 aa, synthetic construct
  REGION 1..468: note = Variant of RNase inhibitor
MHHHHHHGGSGTMSLDIQCQQLSDARWTELLPLLQQSEVVRLDDCGLTESRCKDISSALQANPSLTELSLCTNELGDAGVTLVLQGLQSGTCKIEKLSLQNCCLTKTGCGVLGDMLRSMPTLRALYLNDNPLGDAGLQLLCSGLVDENCHLEKLQVEYCNLTAASCESLASALRAKVHFKELAVSNNELGEAGVRVLCRGLVESPCQLEVLKLENCGLTSASCEDLCRVVASKPSLQELDLGMNKLGDQGIATLCPTLLHPSCQIRVLWLWNCDITTAGCRDLCQVLRAKPSLKELSLAGNALGDEGARLLCESLLEPACQLESLWVKSCSFTAASCQHFSSMLTRNKCLVELQLSNNKLGDCGVQQLCQGLSQPGAALQVLWLGDCDVGHSGCASLASVLLVNRSLRELDLSNNCMGEEGILRLMESVEQPGCVLEQLVLYDIYWSEEMDRRLRALEERKPSLRVIF

SEQ ID NO: 715 - DNA, 1404 bp, synthetic construct
  misc_feature 1..1404: note = Variant of RNase inhibitor
  source 1..1404: mol_type = other DNA
atgcaccatcatcatcatcatggcggtagcggcacgatgtctctggatattcagtgtcaacaattgtcagatgcgcgttggactgaactgttaccgcttctgcaacagagcgaagtggtgcgcctggatgactgcggcctcactgagagtcgctgcaaagacatcagtagtgcactgcaagccaacccatcgttgaccgaattaagcctgtgtacaaatgagctgggtgatgctggagttaccttagtcctgcagggcttgcagtctggcacgtgcaagattgaaaaactgtccctccagaactgttgtctgacgaagactggttgcggtgtattaggcgacatgcttcgttcaatgcccaccctgcgcgcactgtatctgaatgataacccgttgggcgatgcgggcctccagctgctttgctccgggctggtggacgaaaattgtcacctggagaaactgcaggtggaatactgcaatctcacagcagcctcgtgcgaaagcttggcgagcgctctgcgtgccaaacgccattttaaagaattagcggtttcgaacaacgaactgggtgaagcaggcgtgcgcgtactttgtcgtgggctggtggagagtccatgccaactggaggttctgaaactggaaaattgtggattgacctctgcctcctgcgaggatctttgtcgtgtggtcgctagcaaaccaagcctccaggaattggaccttggcatgaacaaattaggtgaccaaggcatcgcaacgttatgcccgaccctgcttcacccttcatgccagattcgtgttttgtggctctggaactgtgatatcaccaccgccggctgccgcgacctctgtcaggtattacgcgcgaagccgtccctcaaagagctgagtcttgcgggtaatgccttgggagatgaaggcgcacgtctcttgtgcgaatcgttattagaaccggcctgccagctcgaaagcctttgggtgaaaagctgttctttcactgctgcttcatgccagcattttagttcgatgttgacgcgcaacaagtgtcttgttgagctccaattgagcaataataaattaggtgattgtggcgtgcaggcgctttgccaagggttatctcaaccaggtgcggccctccaggttttgtggttgggcgactgtgatgtaggtcatagtggctgtgcaagcttagcttccgtgttgcttgtcaaccgttccttacgcgaactcgaccttagtaacaactgcatgggcgaagaagggattctccgtttgatggagagcgttgaacaaccgggatgcgtgcttgaacagttggtcctctatgacatctactggtcggaggagatggatcgtcgtttacgtgccttagaagagcgcaaaccgtcattgcgcgtgattttc

SEQ ID NO: 716 - protein, 468 aa, synthetic construct
  REGION 1..468: note = Variant of RNase inhibitor
MHHHHHHGGSGTMSLDIQCQQLSDARWTELLPLLQQSEVVRLDDCGLTESRCKDISSALQANPSLTELSLCTNELGDAGVTLVLQGLQSGTCKIEKLSLQNCCLTKTGCGVLGDMLRSMPTLRALYLNDNPLGDAGLQLLCSGLVDENCHLEKLQVEYCNLTAASCESLASALRAKRHFKELAVSNNELGEAGVRVLCRGLVESPCQLEVLKLENCGLTSASCEDLCRVVASKPSLQELDLGMNKLGDQGIATLCPTLLHPSCQIRVLWLWNCDITTAGCRDLCQVLRAKPSLKELSLAGNALGDEGARLLCESLLEPACQLESLWVKSCSFTAASCQHFSSMLTRNKCLVELQLSNNKLGDCGVQALCQGLSQPGAALQVLWLGDCDVGHSGCASLASVLLVNRSLRELDLSNNCMGEEGILRLMESVEQPGCVLEQLVLYDIYWSEEMDRRLRALEERKPSLRVIF

SEQ ID NO: 717 - DNA, 1404 bp, synthetic construct
  misc_feature 1..1404: note = Variant of RNase inhibitor
  source 1..1404: mol_type = other DNA
atgcaccatcatcatcatcatggcggtagcggcacgatgtctctggatattcagtgtcaacaattgtcagatgcgcgttggactgaactgttaccgcttctgcaacagagcgaagtggtgcgcctggatgactgcggcctcactgagagtcgctgcaaagacatcagtagtgcactgcaagccaacccatcgttgaccgaattaagcctgtgtacaaatgagctgggtgatgctggagttaccttagtcctgcagggcttgcagtctggcacgtgcaagattgaaaaactgtccctccagaactgttgtctgacgaagactggttgcggtgtattaggcgacatgcttcgttcaatgcccaccctgcgcgcactgtatctgaatgataacccgttgggcgatgcgggcctccagctgctttgctccgggctggtggacgaaaattgtcacctggagaaactgcaggtggaatactgcaatctcacagcagcctcgtgcgaaagcttggcgagcgctctgcgtgccaaacgccattttaaagaattagcggtttcgaacaacgaactgggtgaagcaggcgtgcgcgtactttgtcgtgggctggtggagagtccatgccaactggaggttctgaaactggaaaattgtggattgacctctgcctcctgcgaggatctttgtcgtgtggtcgctagcaaaccaagcctccaggaattggaccttggcatgaacaaattaggtgaccaaggcatcgcaacgttatgcccgaccctgctttcgccttcatgccagattcgtgttttgtggctctggaactgtgatatcaccaccgccggctgccgcgacctctgtcaggtattacgcgcgaagccgtccctcaaagagctgagtcttgcgggtaatgccttgggagatgaaggcgcacgtctcttgtgcgaatcgttattagaaccggcctgccagctcgaaagcctttgggtgaaaagctgttctttcactgctgcttcatgccagcattttagttcgatgttgacgcgcaacaagtgtcttgttgagctccaattgagcaataataaattaggtgattgtggcgtgcagcagctttgccaagggttatctcaaccaggtgcggccctccaggttttgtggttgggcgactgtgatgtaggtcatagtggctgtgcaagcttagcttccgtgttgcttgtcaaccgttccttacgcgaactcgaccttagtaacaactgcatgggcgaagaagggattctccgtttgatggagagcgttgaacaaccgggatgcgtgcttgaacagttggtcctctatgacatctactggtcggaggagatggatcgtcgtttacgtgccttagaagagcgcaaaccgtcattgcgcgtgattttc

SEQ ID NO: 718 - protein, 468 aa, synthetic construct
  REGION 1..468: note = Variant of RNase inhibitor
MHHHHHHGGSGTMSLDIQCQQLSDARWTELLPLLQQSEVVRLDDCGLTESRCKDISSALQANPSLTELSLCTNELGDAGVTLVLQGLQSGTCKIEKLSLQNCCLTKTGCGVLGDMLRSMPTLRALYLNDNPLGDAGLQLLCSGLVDENCHLEKLQVEYCNLTAASCESLASALRAKRHFKELAVSNNELGEAGVRVLCRGLVESPCQLEVLKLENCGLTSASCEDLCRVVASKPSLQELDLGMNKLGDQGIATLCPTLLSPSCQIRVLWLWNCDITTAGCRDLCQVLRAKPSLKELSLAGNALGDEGARLLCESLLEPACQLESLWVKSCSFTAASCQHFSSMLTRNKCLVELQLSNNKLGDCGVQQLCQGLSQPGAALQVLWLGDCDVGHSGCASLASVLLVNRSLRELDLSNNCMGEEGILRLMESVEQPGCVLEQLVLYDIYWSEEMDRRLRALEERKPSLRVIF

SEQ ID NO: 719 - DNA, 1404 bp, synthetic construct
  misc_feature 1..1404: note = Variant of RNase inhibitor
  source 1..1404: mol_type = other DNA
atgcaccatcatcatcatcatggcggtagcggcacgatgtctctggatattcagtgtcaacaattgtcagatgcgcgttgggcggaactgttaccgcttctgcaacagagcgaagtggtgcgcctggatgactgcggcctcactgagagtcgctgcaaagacatcagtagtgcactgcaagccaacccatcgttgaccgaattaagcctgtgtacaaatgagctgggtgatgctggagttaccttagtcctgcagggcttgcagtctggcacgtgcaagattgaaaaactgtccctccagaactgttgtctgacgaagactggttgcggtgtattaggcgacatgcttcgttcaatgcccaccctgcgcgcactgtatctgaatgataacccgttgggcgatgcgggcctccagctgctttgctccgggctggtggacgaaaattgtcacctggagaaactgcaggtggaatactgcaatctcacagcagcctcgtgcgaaagcttggcgagcgctctgcgtgccaaacgccattttaaagaattagcggtttcgaacaacgaactgggtgaagcaggcgtgcgcgtactttgtcgtgggctggtggagagtccatgccaactggaggttctgaaactggaaaattgtggattgacctctgcctcctgcgaggatctttgtcgtgtggtcgctagcaaaccaagcctccaggaattggaccttggcatgaacaaattaggtgaccaaggcatcgcaacgttatgcccgaccctgcttcacccttcatgccagattcgtgttttgtggctctggaactgtgatatcaccaccgccggctgccgcgacctctgtcaggtattacgcgcgaagccgtccctcaaagagctgagtcttgcgggtaatgccttgggagatgaaggcgcacgtctcttgtgcgaatcgttattagaaccggcctgccagctcgaaagcctttgggtgaaaagctgttctttcactgctgcttcatgccagcattttagttcgatgttgacgcgcaacaagtgtcttgttgagctccaattgagcaataataaattaggtgattgtggcgtgcagcagctttgccaagggttatctcaaccaggtgcggccctccaggttttgtggttgggcgactgtgatgtaggtcatagtggctgtgcaagcttagcttccgtgttgcttgtcaaccgttccttacgcgaactcgaccttagtaacaactgcatgggcgaagaagggattctccgtttgatggagagcgttgaacaaccgggatgcgtgcttgaacagttggtcctctatgacatctactggtcggaggagatggatcgtcgtttacgtgccttagaagagcgcaaaccgtcattgcgcgtgattttc

SEQ ID NO: 720 - protein, 468 aa, synthetic construct
  REGION 1..468: note = Variant of RNase inhibitor
MHHHHHHGGSGTMSLDIQCQQLSDARWAELLPLLQQSEVVRLDDCGLTESRCKDISSALQANPSLTELSLCTNELGDAGVTLVLQGLQSGTCKIEKLSLQNCCLTKTGCGVLGDMLRSMPTLRALYLNDNPLGDAGLQLLCSGLVDENCHLEKLQVEYCNLTAASCESLASALRAKRHFKELAVSNNELGEAGVRVLCRGLVESPCQLEVLKLENCGLTSASCEDLCRVVASKPSLQELDLGMNKLGDQGIATLCPTLLHPSCQIRVLWLWNCDITTAGCRDLCQVLRAKPSLKELSLAGNALGDEGARLLCESLLEPACQLESLWVKSCSFTAASCQHFSSMLTRNKCLVELQLSNNKLGDCGVQQLCQGLSQPGAALQVLWLGDCDVGHSGCASLASVLLVNRSLRELDLSNNCMGEEGILRLMESVEQPGCVLEQLVLYDIYWSEEMDRRLRALEERKPSLRVIF

SEQ ID NO: 721 - DNA, 1404 bp, synthetic construct
  misc_feature 1..1404: note = Variant of RNase inhibitor
  source 1..1404: mol_type = other DNA
atgcaccatcatcatcatcatggcggtagcggcacgatgtctctggatattcagtgtcaacaattgtcagatgcgcgttggactgaactgttaccgcttctgcaacagagcgaagtggtgcgcctggatgactgcggcctcactgagagtcgctgcaaagacatcagtagtgcactgcaagccaacccatcgttgaccgaattaagcctgtgtacaaatgagctgggtgatgctggagttaccttagtcctgcagggcttgcagtctggcacgtgcaagattgaaaaactgtccctccagaactgttgtctgacgaagactggttgcggtgtattaggcgacatgcttcgtcgtatgcccaccctgcgcgcactgtatctgaatgataacccgttgggcgatgcgggcctccagctgctttgctccgggctggtggacgaaaattgtcacctggagaaactgcaggtggaatactgcaatctcacagcagcctcgtgcgaaagcttggcgagcgctctgcgtgccaaacgccattttaaagaattagcggtttcgaacaacgaactgggtgaagcaggcgtgcgcgtactttgtcgtgggctggtggagagtccatgccaactggaggttctgaaactggaaaattgtggattgacctctgcctcctgcgaggatctttgtcgtgtggtcgctagcaaaccaagcctccaggaattggaccttggcatgaacaaattaggtgaccaaggcatcgcaacgttatgcccgaccctgcttcacccttcatgccagattcgtgttttgtggctctggaactgtgatatcaccaccgccggctgccgcgacctctgtcaggtattacgcgcgaagccgtccctcaaagagctgagtcttgcgggtaatgccttgggagatgaaggcgcacgtctcttgtgcgaatcgttattagaaccggcctgccagctcgaaagcctttgggtgaaaagctgttctttcactgctgcttcatgccagcattttagttcgatgttgacgcgcaacaagtgtcttgttgagctccaattgagcaataataaattaggtgattgtggcgtgcagcagctttgccaagggttatctcaaccaggtgcggccctccaggttttgtggttgggcgactgtgatgtaggtcatagtggctgtgcaagcttagcttccgtgttgcttgtcaaccgttccttacgcgaactcgaccttagtaacaactgcatgggcgaagaagggattctccgtttgatggagagcgttgaacaaccgggatgcgtgcttgaacagttggtcctctatgacatctactggtcggaggagatggatcgtcgtttacgtgccttagaagagcgcaaaccgtcattgcgcgtgattttc

SEQ ID NO: 722 - protein, 468 aa, synthetic construct
  REGION 1..468: note = Variant of RNase inhibitor
MHHHHHHGGSGTMSLDIQCQQLSDARWTELLPLLQQSEVVRLDDCGLTESRCKDISSALQANPSLTELSLCTNELGDAGVTLVLQGLQSGTCKIEKLSLQNCCLTKTGCGVLGDMLRRMPTLRALYLNDNPLGDAGLQLLCSGLVDENCHLEKLQVEYCNLTAASCESLASALRAKRHFKELAVSNNELGEAGVRVLCRGLVESPCQLEVLKLENCGLTSASCEDLCRVVASKPSLQELDLGMNKLGDQGIATLCPTLLHPSCQIRVLWLWNCDITTAGCRDLCQVLRAKPSLKELSLAGNALGDEGARLLCESLLEPACQLESLWVKSCSFTAASCQHFSSMLTRNKCLVELQLSNNKLGDCGVQQLCQGLSQPGAALQVLWLGDCDVGHSGCASLASVLLVNRSLRELDLSNNCMGEEGILRLMESVEQPGCVLEQLVLYDIYWSEEMDRRLRALEERKPSLRVIF

SEQ ID NO: 723 - DNA, 1404 bp, synthetic construct
  misc_feature 1..1404: note = Variant of RNase inhibitor
  source 1..1404: mol_type = other DNA
atgcaccatcatcatcatcatggcggtagcggcacgatgtctctggatattcagtgtcaacaattgtcagatgcgcgttggactgaactgttaccgcttctgcaacagagcgaagtggtgcgcctggatgactgcggcctcactgagagtcgctgcaaagacatcagtagtgcactgcaagccaacccagttttgaccgaattaagcctgtgtacaaatgagctgggtgatgctggagttaccttagtcctgcagggcttgcagtctggcacgtgcaagattgaaaaactgtccctccagaactgttgtctgacgaagactggttgcggtgtattaggcgacatgcttcgttcaatgcccaccctgcgcgcactgtatctgaatgataacccgttgggcgatgcgggcctccagctgctttgctccgggctggtggacgaaaattgtcacctggagaaactgcaggtggaatactgcaatctcacagcagcctcgtgcgaaagcttggcgagcgctctgcgtgccaaacgccattttaaagaattagcggtttcgaacaacgaactgggtgaagcaggcgtgcgcgtactttgtcgtgggctggtggagagtccatgccaactggaggttctgaaactggaaaattgtggattgacctctgcctcctgcgaggatctttgtcgtgtggtcgctagcaaaccaagcctccaggaattggaccttggcatgaacaaattaggtgaccaaggcatcgcaacgttatgcccgaccctgcttcacccttcatgccagattcgtgttttgtggctctggaactgtgatatcaccaccgccggctgccgcgacctctgtcaggtattacgcgcgaagccgtccctcaaagagctgagtcttgcgggtaatgccttgggagatgaaggcgcacgtctcttgtgcgaatcgttattagaaccggcctgccagctcgaaagcctttgggtgaaaagctgttctttcactgctgcttcatgccagcattttagttcgatgttgacgcgcaacaagtgtcttgttgagctccaattgagcaataataaattaggtgattgtggcgtgcagcagctttgccaagggttatctcaaccaggtgcggccctccaggttttgtggttgggcgactgtgatgtaggtcatagtggctgtgcaagcttagcttccgtgttgcttgtcaaccgttccttacgcgaactcgaccttagtaacaactgcatgggcgaagaagggattctccgtttgatggagagcgttgaacaaccgggatgcgtgcttgaacagttggtcctctatgacatctactggtcggaggagatggatcgtcgtttacgtgccttagaagagcgcaaaccgtcattgcgcgtgattttc

SEQ ID NO: 724 - protein, 468 aa, synthetic construct
  REGION 1..468: note = Variant of RNase inhibitor
MHHHHHHGGSGTMSLDIQCQQLSDARWTELLPLLQQSEVVRLDDCGLTESRCKDISSALQANPVLTELSLCTNELGDAGVTLVLQGLQSGTCKIEKLSLQNCCLTKTGCGVLGDMLRSMPTLRALYLNDNPLGDAGLQLLCSGLVDENCHLEKLQVEYCNLTAASCESLASALRAKRHFKELAVSNNELGEAGVRVLCRGLVESPCQLEVLKLENCGLTSASCEDLCRVVASKPSLQELDLGMNKLGDQGIATLCPTLLHPSCQIRVLWLWNCDITTAGCRDLCQVLRAKPSLKELSLAGNALGDEGARLLCESLLEPACQLESLWVKSCSFTAASCQHFSSMLTRNKCLVELQLSNNKLGDCGVQQLCQGLSQPGAALQVLWLGDCDVGHSGCASLASVLLVNRSLRELDLSNNCMGEEGILRLMESVEQPGCVLEQLVLYDIYWSEEMDRRLRALEERKPSLRVIF

SEQ ID NO: 725 - DNA, 1404 bp, synthetic construct
  misc_feature 1..1404: note = Variant of RNase inhibitor
  source 1..1404: mol_type = other DNA
atgcaccatcatcatcatcatggcggtagcggcacgatgtctctggatattcagtgtcaacaattgtcagatgcgcgttgggctgaactgttaccgcttctgcaacagtcggaagtggtgcgcctggatgactgcggcctcactgagagtcgctgcaaagacatcagtagtgcactgcaagccaacccacgtttgaccgaattaagcctgtgtacaaatgagctgggtgatgctggagttaccttagtcctgcagggcttgcagtctggcacgtgcaagattgaaaaactgtccctccagaactgttgtctgacgaaggatggttgcggtgtattaggcgacatgcttcgtcgtatgcccaccctgcgcgcactgtatctgaatgataacccgttgggcgatgcgggcctccagctgctttgccaggggctggtggacgaaaattgtcacctggagaaactgcaggtggaatactgcaatctcacagcagcctcgtgcgaaagcttggcgagcgctctgcgtttctcgcgtcattttaaagaattagcggtttcgaacaacgaactgggtgaagcaggcgtgcgcgtactttgtcgtgggctggtggagagtccatgccaactggaggttctgaaactggaaaattgtggattgacctctgcctcctgcgaggatctttgtctggtggtcgctagcaaaccaagcctccaggaattggaccttggcatgaacaaattaggtgaccaaggcatcgcaacgttatgcccgaccctgcttagcccttcatgccagattcgtgttttgtggctctggaactgtgatatcaccaccgccggctgccgcgacctctgtcaggtattacgcgcgaagccgtccctcaaagagctgagtcttgcgggtaatgccttgggagatgaaggcgcacgtctcttgtgcgaatcgttattagaaccgggctgccagctcgaaagcctttgggtgaaaagctgttctttcactgctgcttcatgcgtgcattttagtatgatgttgacgcgcaacaagtgtcttgttgagctccaattgagcaataataaattaggtgattgtggcgtgcagctgctttgccaagggttatctcaaccaggtgcggccctccaggttttgtggttgggcgactgtgatgtaggtcatagtggctgtctgtcgttagcttccgtgttgcttgtcaaccgttccttacgcgaactcgaccttagtaacaactgcatgggcgaagaagggattctccgtttgatggagagcgttgaacaaccgggatgcgtgcttgaacagttggtcctctatgacatctactggtcggaggagatggatcgtcgtttacgtgccttagaagagcgcaaaccgtcattgcgcgtgattttc

SEQ ID NO: 726 - protein, 468 aa, synthetic construct
  REGION 1..468: note = Variant of RNase inhibitor
MHHHHHHGGSGTMSLDIQCQQLSDARWAELLPLLQQSEVVRLDDCGLTESRCKDISSALQANPRLTELSLCTNELGDAGVTLVLQGLQSGTCKIEKLSLQNCCLTKDGCGVLGDMLRRMPTLRALYLNDNPLGDAGLQLLCQGLVDENCHLEKLQVEYCNLTAASCESLASALRFSRHFKELAVSNNELGEAGVRVLCRGLVESPCQLEVLKLENCGLTSASCEDLCLVVASKPSLQELDLGMNKLGDQGIATLCPTLLSPSCQIRVLWLWNCDITTAGCRDLCQVLRAKPSLKELSLAGNALGDEGARLLCESLLEPGCQLESLWVKSCSFTAASCVHFSMMLTRNKCLVELQLSNNKLGDCGVQLLCQGLSQPGAALQVLWLGDCDVGHSGCLSLASVLLVNRSLRELDLSNNCMGEEGILRLMESVEQPGCVLEQLVLYDIYWSEEMDRRLRALEERKPSLRVIF

SEQ ID NO: 727 - DNA, 1404 bp, synthetic construct
  misc_feature 1..1404: note = Variant of RNase inhibitor
  source 1..1404: mol_type = other DNA
atgcaccatcatcatcatcatggcggtagcggcacgatgtctctggatattcagtgtcaacaattgtcagatgcgcgttggactgaactgttaccgcttctgcaacagtcggaagtggtgcgcctggatgactgcggcctcactgagagtcgctgcaaagacatcagtagtgcactgcaagccaacccacgtttgaccgaattaagcctgtgtacaaatgagctgggtgatgctggagttaccttagtcctgcagggcttgcagtctggcacgtgcaagattgaaaaactgtccctccagaactgttgtctgacgaaggatggttgcggtgtattaggcgacatgcttcgtcgtatgcccaccctgcgcgcactgtatctgaatgataacccgttgggcgatgcgggcctccagctgctttgccaggggctggtggacgaaaattgtcacctggagaaactgcaggtggaatactgcaatctcacagcagcctcgtgcgaatttttggcgagcgctctgcgtgcctcgcgccattttaaagaattagcggtttcgaacaacgaactgggtgaagcaggcgtgcgcgtactttgtcgtgggctggtggagagtccatgccaactggaggttctgaaactggaaaattgtggattgacctctgcctcctgcgaggatctttgtctggtggtcgctagcaaaccaagcctccaggaattggaccttggcatgaacaaattaggtgaccaaggcatcgcaacgttatgcccgaccctgctttatccttcatgccagattcgtgttttgtggctctggaactgtgatatcaccaccgccggctgccgcgacctctgtcaggtattacgcgcgaagccgtccctcaaagagctgagtcttgcgggtaatgccttgggagatgaaggcgcacgtctcttgtgcgaatcgttattagaaccgggctgccagctcgaaagcctttgggtgaaaagctgttctttcactgctgcttcatgccagcattttagtatgatgttgacgcgcaacaagtgtcttgttgagctccaattgagcaataataaattaggtgattgtggcgtgcagcagctttgccaagggttatctcaaccaggtgcggccctccaggttttgtggttgggcgactgtgatgtaggtcatagtggctgtctggcgttagcttccgtgttgcttgtcaaccgttccttacgcgaactcgaccttagtaacaactgcatgggcgaagaagggattctccgtttgatggagagcgttgaacaaccgggatgcgtgcttgaacagttggtcctctatgacatctactggtcggaggagatggatcgtcgtttacgtgccttagaagagcgcaaaccgtcattgcgcgtgattttc

SEQ ID NO: 728 - protein, 468 aa, synthetic construct
  REGION 1..468: note = Variant of RNase inhibitor
MHHHHHHGGSGTMSLDIQCQQLSDARWTELLPLLQQSEVVRLDDCGLTESRCKDISSALQANPRLTELSLCTNELGDAGVTLVLQGLQSGTCKIEKLSLQNCCLTKDGCGVLGDMLRRMPTLRALYLNDNPLGDAGLQLLCQGLVDENCHLEKLQVEYCNLTAASCEFLASALRASRHFKELAVSNNELGEAGVRVLCRGLVESPCQLEVLKLENCGLTSASCEDLCLVVASKPSLQELDLGMNKLGDQGIATLCPTLLYPSCQIRVLWLWNCDITTAGCRDLCQVLRAKPSLKELSLAGNALGDEGARLLCESLLEPGCQLESLWVKSCSFTAASCQHFSMMLTRNKCLVELQLSNNKLGDCGVQQLCQGLSQPGAALQVLWLGDCDVGHSGCLALASVLLVNRSLRELDLSNNCMGEEGILRLMESVEQPGCVLEQLVLYDIYWSEEMDRRLRALEERKPSLRVIF

SEQ ID NO: 729 - DNA, 1404 bp, synthetic construct
  misc_feature 1..1404: note = Variant of RNase inhibitor
  source 1..1404: mol_type = other DNA
atgcaccatcatcatcatcatggcggtagcggcacgatgtctctggatattcagtgtcaacaattgtcagatgcgcgttggactgaactgttaccgcttctgcaacagtcggcggtggtgcgcctggatgactgcggcctcactgagagtcgctgcaaagacatcagttcggcactgagcgccaacccacgtttgaccgaattaagcctgtgtacaaatgagctgggtgatgctggagttaccttagtcctgcagggcttgcagtctggcacgtgcaagattgaaaaactgtccctccagaactgttgtctgacgaaggatggttgcggtgtattaggcgacatgcttcgttcaatgcccaccctgcgcgcactgtatctgaatgataacccgttgggcgatgcgggcctccagctgctttgccaggggctggtggacgaaaattgtcacctggagaaactgcaggtggaatactgcaatctcacagcagcctcgtgcgaatttttggcgagcgctctgcgtgcatcgcgtcattttaaagaattagcggtttcgaacaacgaactgggtgaagcaggcgtgcgcgtactttgtcgtgggctggtggagagtccatgccaactggaggttctgaaactggaaaattgtggattgacctctgcctcctgcgaggatctttgtctggtggtcgctagcaaaccaagcctccaggaattggaccttggcatgaacaaattaggtgaccaaggcatcgcaacgttatgcccgaccctgcttctgccttcatgccagattcgtgttttgtggctctggaactgtgatatcaccaccgccggctgccgcgacctctgtcaggtattacgcgcgaagccgtccctcaaagagctgagtcttgcgggtaatgccttgggagatgaaggcgcacgtctcttgtgcgaatcgttattagaaccgggctgccagctcgaaagcctttgggtgaaaagctgttctttcactgctgcttcatgcgtgcattttagtatgatgttgacgcgcaacaagtgtcttgttgagctccaattgagcaataataaattaggtgattgtggcgtgcagctgctttgccaagggttatctcaaccaggtgcggccctccaggttttgtggttgggcgactgtgatgtaggtcatagtggctgtctgtcgttagcttccgtgttgcttgtcaaccgttccttacgcgaactcgaccttagtaacaactgcatgggcgaagaagggattctccgtttgatggagagcgttgaacaaccgggatgcgtgcttgaacagttggtcctctatgacatctactggtcggaggagatggatcgtcgtttacgtgccttagaagagcgcaaaccgtcattgcgcgtgattttc

SEQ ID NO: 730 - protein, 468 aa, synthetic construct
  REGION 1..468: note = Variant of RNase inhibitor
MHHHHHHGGSGTMSLDIQCQQLSDARWTELLPLLQQSAVVRLDDCGLTESRCKDISSALSANPRLTELSLCTNELGDAGVTLVLQGLQSGTCKIEKLSLQNCCLTKDGCGVLGDMLRSMPTLRALYLNDNPLGDAGLQLLCQGLVDENCHLEKLQVEYCNLTAASCEFLASALRASRHFKELAVSNNELGEAGVRVLCRGLVESPCQLEVLKLENCGLTSASCEDLCLVVASKPSLQELDLGMNKLGDQGIATLCPTLLLPSCQIRVLWLWNCDITTAGCRDLCQVLRAKPSLKELSLAGNALGDEGARLLCESLLEPGCQLESLWVKSCSFTAASCVHFSMMLTRNKCLVELQLSNNKLGDCGVQLLCQGLSQPGAALQVLWLGDCDVGHSGCLSLASVLLVNRSLRELDLSNNCMGEEGILRLMESVEQPGCVLEQLVLYDIYWSEEMDRRLRALEERKPSLRVIF

SEQ ID NO: 731 - DNA, 1404 bp, synthetic construct
  misc_feature 1..1404: note = Variant of RNase inhibitor
  source 1..1404: mol_type = other DNA
atgcaccatcatcatcatcatggcggtagcggcacgatgtctctggatattcagtgtcaacaattgtcagatgcgcgttgggctgaactgttaccgcttctgcaacagtcggcggtggtgcgcctggatgactgcggcctcactgagagtcgctgcaaagacatcagtgtcgcactgagcgccaacccacgtttgaccgaattaagcctgtgtacaaatgagctgggtgatgctggagttaccttagtcctgcagggcttgcagtctggcacgtgcaagattgaaaaactgtccctccagaactgttgtctgacgaaggatggttgcggtgtattaggcgacatgcttcgtagtatgcccaccctgcgcgcactgtatctgaatgataacccgttgggcgatgcgggcctccagctgctttgccaggggctggtggacgaaaattgtcacctggagaaactgcaggtggaatactgcaatctcacagcagcctcgtgcgaaagtttggcgagcgctctgcgtgcatcgcgtcattttaaagaattagcggtttcgaacaacgaactgggtgaagcaggcgtgcgcgtactttgtcgtgggctggtggagagtccatgccaactggaggttctgaaactggaaaattgtggattgacctctgcctcctgcgaggatctttgtctggtggtcgctagcaaaccaagcctccaggaattggaccttggcatgaacaaattaggtgaccaaggcatcgcaacgttatgcccgaccctgcttctgccttcatgccagattcgtgttttgtggctctggaactgtgatatcaccaccgccggctgccgcgacctctgtcaggtattacgcgcgaagccgtccctcaaagagctgagtcttgcgggtaatgccttgggagatgaaggcgcacgtctcttgtgcgaatcgttattagaaccgggctgccagctcgaaagcctttgggtgaaaagctgttctttcactgctgcttcatgccagcattttagtatgatgttgacgcgcaacaagtgtcttgttgagctccaattgagcaataataaattaggtgatatgggcgtgcagctgctttgccaagggttatctcaaccaggtgcggccctccaggttttgtggttgggcgactgtgatgtaggtcatagtggctgtctgtcgttagcttccgtgttgcttgtcaaccgttccttacgcgaactcgaccttagtaacaactgcatgggcgaagaagggattctccgtttgatggagagcgttgaacaaccgggatgcgtgcttgaacagttggtcctctatgacatctactggtcggaggagatggatcgtcgtttacgtgccttagaagagcgcaaaccgtcattgcgcgtgattttc

SEQ ID NO: 732 - protein, 468 aa, synthetic construct
  REGION 1..468: note = Variant of RNase inhibitor
MHHHHHHGGSGTMSLDIQCQQLSDARWAELLPLLQQSAVVRLDDCGLTESRCKDISVALSANPRLTELSLCTNELGDAGVTLVLQGLQSGTCKIEKLSLQNCCLTKDGCGVLGDMLRSMPTLRALYLNDNPLGDAGLQLLCQGLVDENCHLEKLQVEYCNLTAASCESLASALRASRHFKELAVSNNELGEAGVRVLCRGLVESPCQLEVLKLENCGLTSASCEDLCLVVASKPSLQELDLGMNKLGDQGIATLCPTLLLPSCQIRVLWLWNCDITTAGCRDLCQVLRAKPSLKELSLAGNALGDEGARLLCESLLEPGCQLESLWVKSCSFTAASCQHFSMMLTRNKCLVELQLSNNKLGDMGVQLLCQGLSQPGAALQVLWLGDCDVGHSGCLSLASVLLVNRSLRELDLSNNCMGEEGILRLMESVEQPGCVLEQLVLYDIYWSEEMDRRLRALEERKPSLRVIF

SEQ ID NO: 733 - DNA, 1404 bp, synthetic construct
  misc_feature 1..1404: note = Variant of RNase inhibitor
  source 1..1404: mol_type = other DNA
atgcaccatcatcatcatcatggcggtagcggcacgatgtctctggatattcagtgtcaacaattgtcagatgcgcgttggactgaactgttaccgcttctgcaacagtcggaagtggtgcgcctggatgactgcggcctcactgagagtcgctgcaaagacatcagtgtcgcactgcaggccaacccacgtttgaccgaattaagcctgtgtacaaatgagctgggtgatgctggagttaccttagtcctgcagggcttgcagtctggcacgtgcaagattgaaaaactgtccctccagaactgttgtctgacgaaggatggttgcggtgtattaggcgacatgcttcgtcgtatgcccaccctgcgcgcactgtatctgaatgataacccgttgggcgatgcgggcctccagctgctttgccaggggctggtggacgaaaattgtcacctggagaaactgcaggtggaatactgcaatctcacagcagcctcgtgcgaaagcttggcgagcgctctgcgtgcatcgcgtcattttaaagaattagcggtttcgaacaacgaactgggtgaagcaggcgtgcgcgtactttgtcgtgggctggtggagagtccatgccaactggaggttctgaaactggaaaattgtggattgacctctgcctcctgcgaggatctttgtctggtggtcgctagcaaaccaagcctccaggaattggaccttggcatgaacaaattaggtgaccaaggcatcgcaacgttatgcccgaccctgcttctgccttcatgccagattcgtgttttgtggctctggaactgtgatatcaccaccgccggctgccgcgacctctgtcaggtattacgcgcgaagccgtccctcaaagagctgagtcttgcgggtaatgccttgggagatgaaggcgcacgtctcttgtgcgaatcgttattagaaccgggctgccagctcgaaagcctttgggtgaaaagctgttctttcactgctgcttcatgcgtgcattttagtatgatgttgacgcgcaacaagtgtcttgttgagctccaattgagcaataataaattaggtgattgtggcgtgcagctgctttgccaagggttatctcaaccaggtgcggccctccaggttttgtggttgggcgactgtgatgtaggtcatagtggctgtctgtcgttagcttccgtgttgcttgtcaaccgttccttacgcgaactcgaccttagtaacaactgcatgggcgaagaagggattctccgtttgatggagagcgttgaacaaccgggatgcgtgcttgaacagttggtcctctatgacatctactggtcggaggagatggatcgtcgtttacgtgccttagaagagcgcaaaccgtcattgcgcgtgattttc

SEQ ID NO: 734 - protein, 468 aa, synthetic construct
  REGION 1..468: note = Variant of RNase inhibitor
MHHHHHHGGSGTMSLDIQCQQLSDARWTELLPLLQQSEVVRLDDCGLTESRCKDISVALQANPRLTELSLCTNELGDAGVTLVLQGLQSGTCKIEKLSLQNCCLTKDGCGVLGDMLRRMPTLRALYLNDNPLGDAGLQLLCQGLVDENCHLEKLQVEYCNLTAASCESLASALRASRHFKELAVSNNELGEAGVRVLCRGLVESPCQLEVLKLENCGLTSASCEDLCLVVASKPSLQELDLGMNKLGDQGIATLCPTLLLPSCQIRVLWLWNCDITTAGCRDLCQVLRAKPSLKELSLAGNALGDEGARLLCESLLEPGCQLESLWVKSCSFTAASCVHFSMMLTRNKCLVELQLSNNKLGDCGVQLLCQGLSQPGAALQVLWLGDCDVGHSGCLSLASVLLVNRSLRELDLSNNCMGEEGILRLMESVEQPGCVLEQLVLYDIYWSEEMDRRLRALEERKPSLRVIF

SEQ ID NO: 735 - DNA, 1404 bp, synthetic construct
  misc_feature 1..1404: note = Variant of RNase inhibitor
  source 1..1404: mol_type = other DNA
atgcaccatcatcatcatcatggcggtagcggcacgatgtctctggatattcagtgtcaacaattgtcagatgcgcgttggactgaactgttaccgcttctgcaacagtcggaagtggtgcgcctggatgactgcggcctcactgagagtcgctgcaaagacatcagtgtcgcactgcaggccaacccacgtttgaccgaattaagcctgtgtacaaatgagctgggtgatgctggagttaccttagtcctgcagggcttgcagtctggcacgtgcaagattgaaaaactgtccctccagaactgttgtctgacgaaggatggttgcggtgtattaggcgacatgcttcgtcgtatgcccaccctgcgcgcactgtatctgaatgataacccgttgggcgatgcgggcctccagctgctttgccaggggctggtggacgaaaattgtcacctggagaaactgcaggtggaatactgcaatctcacagcagcctcgtgcgaatttttggcgagcgctctgcgtgcatcggttcattttaaagaattagcggtttcgaacaacgaactgggtgaagcaggcgtgcgcgtactttgtcgtgggctggtggagagtccatgccaactggaggttctgaaactggaaaattgtggattgacctctgcctcctgcgaggatctttgtctggtggtcgctagcaaaccaagcctccaggaattggaccttggcatgaacaaattaggtgaccaaggcatcgcaacgttatgcccgaccctgcttctgccttcatgccagattcgtgttttgtggctctggaactgtgatatcaccaccgccggctgccgcgacctctgtcaggtattacgcgcgaagccgtccctcaaagagctgagtcttgcgggtaatgccttgggagatgaaggcgcacgtctcttgtgcgaatcgttattagaaccgggctgccagctcgaaagcctttgggtgaaaagctgttctttcactgctgcttcatgcgtgcattttagtatgatgttgacgcgcaacaagtgtcttgttgagctccaattgagcaataataaattaggtgattgtggcgtgcagctgctttgccaagggttatctcaaccaggtgcggccctccaggttttgtggttgggcgactgtgatgtaggtcatagtggctgtctgagcttagcttccgtgttgcttgtcaaccgttccttacgcgaactcgaccttagtaacaactgcatgggcgaagaagggattctccgtttgatggagagcgttgaacaaccgggatgcgtgcttgaacagttggtcctctatgacatctactggtcggaggagatggatcgtcgtttacgtgccttagaagagcgcaaaccgtcattgcgcgtgattttc

SEQ ID NO: 736 - protein, 468 aa, synthetic construct
  REGION 1..468: note = Variant of RNase inhibitor
MHHHHHHGGSGTMSLDIQCQQLSDARWTELLPLLQQSEVVRLDDCGLTESRCKDISVALQANPRLTELSLCTNELGDAGVTLVLQGLQSGTCKIEKLSLQNCCLTKDGCGVLGDMLRRMPTLRALYLNDNPLGDAGLQLLCQGLVDENCHLEKLQVEYCNLTAASCEFLASALRASVHFKELAVSNNELGEAGVRVLCRGLVESPCQLEVLKLENCGLTSASCEDLCLVVASKPSLQELDLGMNKLGDQGIATLCPTLLLPSCQIRVLWLWNCDITTAGCRDLCQVLRAKPSLKELSLAGNALGDEGARLLCESLLEPGCQLESLWVKSCSFTAASCVHFSMMLTRNKCLVELQLSNNKLGDCGVQLLCQGLSQPGAALQVLWLGDCDVGHSGCLSLASVLLVNRSLRELDLSNNCMGEEGILRLMESVEQPGCVLEQLVLYDIYWSEEMDRRLRALEERKPSLRVIF

SEQ ID NO: 737 - DNA, 1404 bp, synthetic construct
  misc_feature 1..1404: note = Variant of RNase inhibitor
  source 1..1404: mol_type = other DNA
atgcaccatcatcatcatcatggcggtagcggcacgatgtctctggatattcagtgtcaacaattgtcagatgcgcgttggactgaactgttaccgcttctgcaacagtcggaagtggtgcgcctggatgactgcggcctcactgagagtcgctgcaaagacatcagtagtgcactgcaagccaacccacgtttgaccgaattaagcctgtgtacaaatgagctgggtgatgctggagttaccttagtcctgcagggcttgcagtctggcacgtgcaagattgaaaaactgtccctccagaactgttgtctgacgaaggatggttgcggtgtattaggcgacatgcttcgttcaatgcccaccctgcgcgcactgtatctgaatgataacccgttgggcgatgcgggcctccagctgctttgccaggggctggtggacgaaaattgtcacctggagaaactgcaggtggaatactgcaatctcacagcagcctcgtgcgaaagcttggcgagcgctctgcgtgcctcgcgtcattttaaagaattagcggtttcgaacaacgaactgggtgaagcaggcgtgcgcgtactttgtcgtgggctggtggagagtccatgccaactggaggttctgaaactggaaaattgtggattgacctctgcctcctgcgaggatctttgtctggtggtcgctagcaaaccaagcctccaggaattggaccttggcatgaacaaattaggtgaccaaggcatcgcaacgttatgcccgaccctgctttatccttcatgccagattcgtgttttgtggctctggaactgtgatatcaccaccgccggctgccgcgacctctgtcaggtattacgcgcgaagccgtccctcaaagagctgagtcttgcgggtaatgccttgggagatgaaggcgcacgtctcttgtgcgaatcgttattagaaccgggctgccagctcgaaagcctttgggtgaaaagctgttctttcactgctgcttcatgccagcattttagtatgatgttgacgcgcaacaagtgtcttgttgagctccaattgagcaataataaattaggtgattgtggcgtgcagcagctttgccaagggttatctcaaccaggtgcggccctccaggttttgtggttgggcgactgtgatgtaggtcatagtggctgtctggcgttagcttccgtgttgcttgtcaaccgttccttacgcgaactcgaccttagtaacaactgcatgggcgaagaagggattctccgtttgatggagagcgttgaacaaccgggatgcgtgcttgaacagttggtcctctatgacatctactggtcggaggagatggatcgtcgtttacgtgccttagaagagcgcaaaccgtcattgcgcgtgattttc

SEQ ID NO: 738 - protein, 468 aa, synthetic construct
  REGION 1..468: note = Variant of RNase inhibitor
MHHHHHHGGSGTMSLDIQCQQLSDARWTELLPLLQQSEVVRLDDCGLTESRCKDISSALQANPRLTELSLCTNELGDAGVTLVLQGLQSGTCKIEKLSLQNCCLTKDGCGVLGDMLRSMPTLRALYLNDNPLGDAGLQLLCQGLVDENCHLEKLQVEYCNLTAASCESLASALRASRHFKELAVSNNELGEAGVRVLCRGLVESPCQLEVLKLENCGLTSASCEDLCLVVASKPSLQELDLGMNKLGDQGIATLCPTLLYPSCQIRVLWLWNCDITTAGCRDLCQVLRAKPSLKELSLAGNALGDEGARLLCESLLEPGCQLESLWVKSCSFTAASCQHFSMMLTRNKCLVELQLSNNKLGDCGVQQLCQGLSQPGAALQVLWLGDCDVGHSGCLALASVLLVNRSLRELDLSNNCMGEEGILRLMESVEQPGCVLEQLVLYDIYWSEEMDRRLRALEERKPSLRVIF

SEQ ID NO: 739 - DNA, 1404 bp, synthetic construct
  misc_feature 1..1404: note = Variant of RNase inhibitor
  source 1..1404: mol_type = other DNA
atgcaccatcatcatcatcatggcggtagcggcacgatgtctctggatattcagtgtcaacaattgtcagatgcgcgttgggctgaactgttaccgcttctgcaacagtcggaggtggtgcgcctggatgactgcggcctcactgagagtcgctgcaaagacatcagtagtgcactgcaagccaacccacgtttgaccgaattaagcctgtgtacaaatgagctgggtgatgctggagttaccttagtcctgcagggcttgcagtctggcacgtgcaagattgaaaaactgtccctccagaactgttgtctgacgaaggatggttgcggtgtattaggcgacatgcttcgtcgtatgcccaccctgcgcgcactgtatctgaatgataacccgttgggcgatgcgggcctccagctgctttgccaggggctggtggacgaaaattgtcacctagagaaactgcaggtggaatactgcaatctcacagcagcctcgtgcgaatttttggcgagcgctctgcgtgcctcgcgccattttaaagaattagcggtttcgaacaacgaactgggtgaagcaggcgtgcgcgtactttgtcgtgggctggtggagagtccatgccaactggaggttctgaaactggaaaattgtggattgacctctgcctcctgcgaggatctttgtctggtggtcgctagcaaaccaagcctccaggaattggaccttggcatgaacaaattaggtgaccaaggcatcgcaacgttatgcccgaccctgcttctgccttcatgccagattcgtgttttgtggctctggaactgtgatatcaccaccgccggctgccgcgacctctgtcaggtattacgcgcgaagccgtccctcaaagagctgagtcttgcgggtaatgccttgggagatgaaggcgcacgtctcttgtgcgaatcgttattagaaccgggctgccagctcgaaagcctttgggtgaaaagctgttctttcactgctgcttcatgccagcattttagtatgatgttgacgcgcaacaagtgtcttgttgagctccaattgagcaataataaattaggtgattgtggcgtgcagctgctttgccaagggttatctcaaccaggtgcggccctccaggttttgtggttgggcgactgtgatgtaggtcatagtggctgtctggcgttagcttccgtgttgcttgtcaaccgttccttacgcgaactcgaccttagtaacaactgcatgggcgaagaagggattctccgtttgatggagagcgttgaacaaccgggatgcgtgcttgaacagttggtcctctatgacatctactggtcggaggagatggatcgtcgtttacgtgccttagaagagcgcaaaccgtcattgcgcgtgattttc

SEQ ID NO: 740 - protein, 468 aa, synthetic construct
  REGION 1..468: note = Variant of RNase inhibitor
MHHHHHHGGSGTMSLDIQCQQLSDARWAELLPLLQQSEVVRLDDCGLTESRCKDISSALQANPRLTELSLCTNELGDAGVTLVLQGLQSGTCKIEKLSLQNCCLTKDGCGVLGDMLRRMPTLRALYLNDNPLGDAGLQLLCQGLVDENCHLEKLQVEYCNLTAASCEFLASALRASRHFKELAVSNNELGEAGVRVLCRGLVESPCQLEVLKLENCGLTSASCEDLCLVVASKPSLQELDLGMNKLGDQGIATLCPTLLLPSCQIRVLWLWNCDITTAGCRDLCQVLRAKPSLKELSLAGNALGDEGARLLCESLLEPGCQLESLWVKSCSFTAASCQHFSMMLTRNKCLVELQLSNNKLGDCGVQLLCQGLSQPGAALQVLWLGDCDVGHSGCLALASVLLVNRSLRELDLSNNCMGEEGILRLMESVEQPGCVLEQLVLYDIYWSEEMDRRLRALEERKPSLRVIF

SEQ ID NO: 741 - DNA, 1404 bp, synthetic construct
  misc_feature 1..1404: note = Variant of RNase inhibitor
  source 1..1404: mol_type = other DNA
atgcaccatcatcatcatcatggcggtagcggcacgatgtctctggatattcagtgtcaacaattgtcagatgcgcgttgggctgaactgttaccgcttctgcaacagtcggaagtggtgcgcctggatgactgcggcctcactgagagtcgctgcaaagacatcagtagtgcactgcaagccaacccacgtttgaccgaattaagcctgtgtacaaatgagctgggtgatgctggagttaccttagtcctgcagggcttgcagtctggcacgtgcaagattgaaaaactgtccctccagaactgttgtctgacgaaggatggttgcggtgtattaggcgacatgcttcgtagtatgcccaccctgcgcgcactgtatctgaatgataacccgttgggcgatgcgggcctccagctgctttgccaggggctggtggacgaaaattgtcacctggagaaactgcaggtggaatactgcaatctcacagcagcctcgtgcgaaagcttggcgagcgctctgcgtgcctcgcgccattttaaagaattagcggtttcgaacaacgaactgggtgaagcaggcgtgcgcgtactttgtcgtgggctggtggagagtccatgccaactggaggttctgaaactggaaaattgtggattgacctctgcctcctgcgaggatctttgtctggtggtcgctagcaaaccaagcctccaggaattggaccttggcatgaacaaattaggtgaccaaggcatcgcaacgttatgcccgaccctgcttctgccttcatgccagattcgtgttttgtggctctggaactgtgatatcaccaccgccggctgccgcgacctctgtcaggtattacgcgcgaagccgtccctcaaagagctgagtcttgcgggtaatgccttgggagatgaaggcgcacgtctcttgtgcgaatcgttattagaaccgggctgccagctcgaaagcctttgggtgaaaagctgttctttcactgctgcttcatgcgtgcattttagtatgatgttgacgcgcaacaagtgtcttgttgagctccaattgagcaataataaattaggtgattgtggcgtgcagcagctttgccaagggttatctcaaccaggtgcggccctccaggttttgtggttgggcgactgtgatgtaggtcatagtggctgtctgagcttagcttccgtgttgcttgtcaaccgttccttacgcgaactcgaccttagtaacaactgcatgggcgaagaagggattctccgtttgatggagagcgttgaacaaccgggatgcgtgcttgaacagttggtcctctatgacatctactggtcggaggagatggatcgtcgtttacgtgccttagaagagcgcaaaccgtcattgcgcgtgattttc

SEQ ID NO: 742 - protein, 468 aa, synthetic construct
  REGION 1..468: note = Variant of RNase inhibitor
MHHHHHHGGSGTMSLDIQCQQLSDARWAELLPLLQQSEVVRLDDCGLTESRCKDISSALQANPRLTELSLCTNELGDAGVTLVLQGLQSGTCKIEKLSLQNCCLTKDGCGVLGDMLRSMPTLRALYLNDNPLGDAGLQLLCQGLVDENCHLEKLQVEYCNLTAASCESLASALRASRHFKELAVSNNELGEAGVRVLCRGLVESPCQLEVLKLENCGLTSASCEDLCLVVASKPSLQELDLGMNKLGDQGIATLCPTLLLPSCQIRVLWLWNCDITTAGCRDLCQVLRAKPSLKELSLAGNALGDEGARLLCESLLEPGCQLESLWVKSCSFTAASCVHFSMMLTRNKCLVELQLSNNKLGDCGVQQLCQGLSQPGAALQVLWLGDCDVGHSGCLSLASVLLVNRSLRELDLSNNCMGEEGILRLMESVEQPGCVLEQLVLYDIYWSEEMDRRLRALEERKPSLRVIF

SEQ ID NO: 743 - DNA, 1404 bp, synthetic construct
  misc_feature 1..1404: note = Variant of RNase inhibitor
  source 1..1404: mol_type = other DNA
atgcaccatcatcatcatcatggcggtagcggcacgatgtctctggatattcagtgtcaacaattgtcagatgcgcgttgggctgaactgttaccgcttctgcaacagtcggaggtggtgcgcctggatgactgcggcctcactgagagtcgctgcaaagacatcagttcggcactgaaggccaacccacgtttgaccgaattaagcctgtgtacaaatgagctgggtgatgctggagttaccttagtcctgcagggcttgcagtctggcacgtgcaagattgaaaaactgtccctccagaactgttgtctgacgaaggatggttgcggtgtattaggcgacatgcttcgttcaatgcccaccctgcgcgcactgtatctgaatgataacccgttgggcgatgcgggcctccagctgctttgccaggggctggtggacgaaaattgtcacctggagaaactgcaggtggaatactgcaatctcacagcagcctcgtgcgaaattttggcgagcgctctgcgtgcctcgcgccattttaaagaattagcggtttcgaacaacgaactgggtgaagcaggcgtgcgcgtactttgtcgtgggctggtggagagtccatgccaactggaggttctgaaactggaaaattgtggattgacctctgcctcctgcgaggatctttgtctggtggtcgctagcaaaccaagcctccaggaattggaccttggcatgaacaaattaggtgaccaaggcatcgcaacgttatgcccgaccctgcttctgccttcatgccagattcgtgttttgtggctctggaactgtgatatcaccaccgccggctgccgcgacctctgtcaggtattacgcgcgaagccgtccctcaaagagctgagtcttgcgggtaatgccttgggagatgaaggcgcacgtctcttgtgcgaatcgttattagaaccgggctgccagctcgaaagcctttgggtgaaaagctgttctttcactgctgcttcatgccagcattttagtatgatgttgacgcgcaacaagtgtcttgttgagctccaattgagcaataataaattaggtgattgtggcgtgcagcagctttgccaagggttatctcaaccaggtgcggccctccaggttttgtggttgggcgactgtgatgtaggtcatagtggctgtctgagcttagcttccgtgttgcttgtcaaccgttccttacgcgaactcgaccttagtaacaactgcatgggcgaagaagggattctccgtttgatggagagcgttgaacaaccgggatgcgtgcttgaacagttggtcctctatgacatctactggtcggaggagatggatcgtcgtttacgtgccttagaagagcgcaaaccgtcattgcgcgtgattttc

SEQ ID NO: 744 - protein, 468 aa, synthetic construct
  REGION 1..468: note = Variant of RNase inhibitor
MHHHHHHGGSGTMSLDIQCQQLSDARWAELLPLLQQSEVVRLDDCGLTESRCKDISSALKANPRLTELSLCTNELGDAGVTLVLQGLQSGTCKIEKLSLQNCCLTKDGCGVLGDMLRSMPTLRALYLNDNPLGDAGLQLLCQGLVDENCHLEKLQVEYCNLTAASCEILASALRASRHFKELAVSNNELGEAGVRVLCRGLVESPCQLEVLKLENCGLTSASCEDLCLVVASKPSLQELDLGMNKLGDQGIATLCPTLLLPSCQIRVLWLWNCDITTAGCRDLCQVLRAKPSLKELSLAGNALGDEGARLLCESLLEPGCQLESLWVKSCSFTAASCQHFSMMLTRNKCLVELQLSNNKLGDCGVQQLCQGLSQPGAALQVLWLGDCDVGHSGCLSLASVLLVNRSLRELDLSNNCMGEEGILRLMESVEQPGCVLEQLVLYDIYWSEEMDRRLRALEERKPSLRVIF

SEQ ID NO: 745 - DNA, 1404 bp, synthetic construct
  misc_feature 1..1404: note = Variant of RNase inhibitor
  source 1..1404: mol_type = other DNA
atgcaccatcatcatcatcatggcggtagcggcacgatgtctctggatattcagtgtcaacaattgtcagatgcgcgttggactgaactgttaccgcttctgcaacagtcggaggtggtgcgcctggatgactgcggcctcactgagagtcgctgcaaagacatcagtgtcgcactgaaggccaacccacgtttgaccgaattaagcctgtgtacaaatgagctgggtgatgctggagttaccttagtcctgcagggcttgcagtctggcacgtgcaagattgaaaaactgtccctccagaactgttgtctgacgaaggatggttgcggtgtattaggcgacatgcttcgtcgtatgcccaccctgcgcgcactgtatctgaatgataacccgttgggcgatgcgggcctccagctgctttgccaggggctggtggacgaaaattgtcacctggagaaactgcaggtggaatactgcaatctcacagcagcctcgtgcgaaagtttggcgagcgctctgcgtttctcggttcattttaaagaattagcggtttcgaacaacgaactgggtgaagcaggcgtgcgcgtactttgtcgtgggctggtggagagtccatgccaactggaggttctgaaactggaaaattgtggattgacctctgcctcctgcgaggatctttgtctggtggtcgctagcaaaccaagcctccaggaattggaccttggcatgaacaaattaggtgaccaaggcatcgcaacgttatgcccgaccctgcttctgccttcatgccagattcgtgttttgtggctctggaactgtgatatcaccaccgccggctgccgcgacctctgtcaggtattacgcgcgaagccgtccctcaaagagctgagtcttgcgggtaatgccttgggagatgaaggcgcacgtctcttgtgcgaatcgttattagaaccgggctgccagctcgaaagcctttgggtgaaaagctgttctttcactgctgcttcatgcgtgcattttagtatgatgttgacgcgcaacaagtgtcttgttgagctccaattgagcaataataaattaggtgattgtggcgtgcagcagctttgccaagggttatctcaaccaggtgcggccctccaggttttgtggttgggcgactgtgatgtaggtcatagtggctgtctgagcttagcttccgtgttgcttgtcaaccgttccttacgcgaactcgaccttagtaacaactgcatgggcgaagaagggattctccgtttgatggagagcgttgaacaaccgggatgcgtgcttgaacagttggtcctctatgacatctactggtcggaggagatggatcgtcgtttacgtgccttagaagagcgcaaaccgtcattgcgcgtgattttc

SEQ ID NO: 746 - protein, 468 aa, synthetic construct
  REGION 1..468: note = Variant of RNase inhibitor
MHHHHHHGGSGTMSLDIQCQQLSDARWTELLPLLQQSEVVRLDDCGLTESRCKDISVALKANPRLTELSLCTNELGDAGVTLVLQGLQSGTCKIEKLSLQNCCLTKDGCGVLGDMLRRMPTLRALYLNDNPLGDAGLQLLCQGLVDENCHLEKLQVEYCNLTAASCESLASALRFSVHFKELAVSNNELGEAGVRVLCRGLVESPCQLEVLKLENCGLTSASCEDLCLVVASKPSLQELDLGMNKLGDQGIATLCPTLLLPSCQIRVLWLWNCDITTAGCRDLCQVLRAKPSLKELSLAGNALGDEGARLLCESLLEPGCQLESLWVKSCSFTAASCVHFSMMLTRNKCLVELQLSNNKLGDCGVQQLCQGLSQPGAALQVLWLGDCDVGHSGCLSLASVLLVNRSLRELDLSNNCMGEEGILRLMESVEQPGCVLEQLVLYDIYWSEEMDRRLRALEERKPSLRVIF

SEQ ID NO: 747 - DNA, 1404 bp, synthetic construct
  misc_feature 1..1404: note = Variant of RNase inhibitor
  source 1..1404: mol_type = other DNA
atgcaccatcatcatcatcatggcggtagcggcacgatgtctctggatattcagtgtcaacaattgtcagatgcgcgttgggctgaactgttaccgcttctgcaacagtcggaggtggtgcgcctggatgactgcggcctcactgagagtcgctgcaaagacatcagtgtcgcactgcaggccaacccacgtttgaccgaattaagcctgtgtacaaatgagctgggtgatgctggagttaccttagtcctgcagggcttgcagtctggcacgtgcaagattgaaaaactgtccctccagaactgttgtctgacgaaggatggttgcggtgtattaggcgacatgcttcgtagtatgcccaccctgcgcgcactgtatctgaatgataacccgttgggcgatgcgggcctccagctgctttgccaggggctggtggacgaaaattgtcacctggagaaactgcaggtggaatactgcaatctcacagcagcctcgtgcgaaagtttggcgagcgctctgcgtgcatcgcgtcattttaaagaattagcggtttcgaacaacgaactgggtgaagcaggcgtgcgcgtactttgtcgtgggctggtggagagtccatgccaactggaggttctgaaactggaaaattgtggattgacctctgcctcctgcgaggatctttgtctggtggtcgctagcaaaccaagcctccaggaattggaccttggcatgaacaaattaggtgaccaaggcatcgcaacgttatgcccgaccctgctttatccttcatgccagattcgtgttttgtggctctggaactgtgatatcaccaccgccggctgccgcgacctctgtcaggtattacgcgcgaagccgtccctcaaagagctgagtcttgcgggtaatgccttgggagatgaaggcgcacgtctcttgtgcgaatcgttattagaaccgggctgccagctcgaaagcctttgggtgaaaagctgttctttcactgctgcttcatgcgtgcattttagtatgatgttgacgcgcaacaagtgtcttgttgagctccaattgagcaataataaattaggtgattgtggcgtgcagctgctttgccaagggttatctcaaccaggtgcggccctccaggttttgtggttgggcgactgtgatgtaggtcatagtggctgtctgagcttagcttccgtgttgcttgtcaaccgttccttacgcgaactcgaccttagtaacaactgcatgggcgaagaagggattctccgtttgatggagagcgttgaacaaccgggatgcgtgcttgaacagttggtcctctatgacatctactggtcggaggagatggatcgtcgtttacgtgccttagaagagcgcaaaccgtcattgcgcgtgattttc

SEQ ID NO: 748 - protein, 468 aa, synthetic construct
  REGION 1..468: note = Variant of RNase inhibitor
MHHHHHHGGSGTMSLDIQCQQLSDARWAELLPLLQQSEVVRLDDCGLTESRCKDISVALQANPRLTELSLCTNELGDAGVTLVLQGLQSGTCKIEKLSLQNCCLTKDGCGVLGDMLRSMPTLRALYLNDNPLGDAGLQLLCQGLVDENCHLEKLQVEYCNLTAASCESLASALRASRHFKELAVSNNELGEAGVRVLCRGLVESPCQLEVLKLENCGLTSASCEDLCLVVASKPSLQELDLGMNKLGDQGIATLCPTLLYPSCQIRVLWLWNCDITTAGCRDLCQVLRAKPSLKELSLAGNALGDEGARLLCESLLEPGCQLESLWVKSCSFTAASCVHFSMMLTRNKCLVELQLSNNKLGDCGVQLLCQGLSQPGAALQVLWLGDCDVGHSGCLSLASVLLVNRSLRELDLSNNCMGEEGILRLMESVEQPGCVLEQLVLYDIYWSEEMDRRLRALEERKPSLRVIF

SEQ ID NO: 749 - DNA, 1404 bp, synthetic construct
  misc_feature 1..1404: note = Variant of RNase inhibitor
  source 1..1404: mol_type = other DNA
atgcaccatcatcatcatcatggcggtagcggcacgatgtctctggatattcagtgtcaacaattgtcagatgcgcgttggactgaactgttaccgcttctgcgccagtcggaggtggtgcgcctggatgactgcggcctcactgagagtcgctgcaaagacatcagtagtgcactgcaagccaacccacgtttgaccgaattaagcctgtgtacaaatgagctgggtgatgctggagttaccttagtcctgcagggcttgcagtctggcacgtgcaagattgaaaaactgtccctccagaactgttgtctgacgaaggatggttgcggtgtattaggcgacatgcttcgtagtatgcccaccctgcgcgcactgtatctgaatgataacccgttgggcgatgcgggcctccagctgctttgccaggggctggtggacgaaaattgtcacctggagaaactgcaggtggaatactgcaatctcacagcagcctcgtgcgaaagtttggcgagcgctctgcgtgcctcgcgccattttaaagaattagcggtttcgaacaacgaactgggtgaagcaggcgtgcgcgtactttgtcgtgggctggtggagagtccatgccaactggaggttctgaaactggaaaattgtggattgacctctgcctcctgcgaggatctttgtctggtggtcgctagcaaaccaagcctccaggaattggaccttggcatgaacaaattaggtgaccaaggcatcgcaacgttatgcccgaccctgcttagcccttcatgccagattcgtgttttgtggctctggaactgtgatatcaccaccgccggctgccgcgacctctgtcaggtattacgcgcgaagccgtccctcaaagagctgagtcttgcgggtaatgccttgggagatgaaggcgcacgtctcttgtgcgaatcgttattagaaccgggctgccagctcgaaagcctttgggtgaaaagctgttctttcactgctgcttcatgcgtgcattttagtatgatgttgacgcgcaacaagtgtcttgttgagctccaattgagcaataataaattaggtgattgtggcgtgcagctgctttgccaagggttatctcaaccaggtgcggccctccaggttttgtggttgggcgactgtgatgtaggtcatagtggctgtctgagcttagcttccgtgttgcttgtcaaccgttccttacgcgaactcgaccttagtaacaactgcatgggcgaagaagggattctccgtttgatggagagcgttgaacaaccgggatgcgtgcttgaacagttggtcctctatgacatctactggtcggaggagatggatcgtcgtttacgtgccttagaagagcgcaaaccgtcattgcgcgtgattttc

SEQ ID NO: 750 - protein, 468 aa, synthetic construct
  REGION 1..468: note = Variant of RNase inhibitor
MHHHHHHGGSGTMSLDIQCQQLSDARWTELLPLLRQSEVVRLDDCGLTESRCKDISSALQANPRLTELSLCTNELGDAGVTLVLQGLQSGTCKIEKLSLQNCCLTKDGCGVLGDMLRSMPTLRALYLNDNPLGDAGLQLLCQGLVDENCHLEKLQVEYCNLTAASCESLASALRASRHFKELAVSNNELGEAGVRVLCRGLVESPCQLEVLKLENCGLTSASCEDLCLVVASKPSLQELDLGMNKLGDQGIATLCPTLLSPSCQIRVLWLWNCDITTAGCRDLCQVLRAKPSLKELSLAGNALGDEGARLLCESLLEPGCQLESLWVKSCSFTAASCVHFSMMLTRNKCLVELQLSNNKLGDCGVQLLCQGLSQPGAALQVLWLGDCDVGHSGCLSLASVLLVNRSLRELDLSNNCMGEEGILRLMESVEQPGCVLEQLVLYDIYWSEEMDRRLRALEERKPSLRVIF

SEQ ID NO: 751 - DNA, 1404 bp, synthetic construct
  misc_feature 1..1404: note = Variant of RNase inhibitor
  source 1..1404: mol_type = other DNA
atgcaccatcatcatcatcatggcggtagcggcacgatgtctctggatattcagtgtcaacaattgtcagatgcgcgttggactgaactgttaccgcttctgcaacagtcggaggtggtgcgcctggatgactgcggcctcactgagagtcgctgcaaagacatcagtagtgcactgcaagccaacccacgtttgaccgaattaagcctgtgtacaaatgagctgggtgatgctggagttaccttagtcctgcagggcttgcagtctggcacgtgcaagattgaaaaactgtccctccagaactgttgtctgacgaaggatggttgcggtgtattaggcgacatgcttcgtcgtatgcccaccctgcgcgcactgtatctgaatgataacccgttgggcgatgcgggcctccagctgctttgccaggggctggtggacgaaaattgtcacctggagaaactgcaggtggaatactgcaatctcacagcagcctcgtgcgaaagcttggcgagcgctctgcgtttctcgcgtcattttaaagaattagcggtttcgaacaacgaactgggtgaagcaggcgtgcgcgtactttgtcgtgggctggtggagagtccatgccaactggaggttctgaaactggaaaattgtggattgacctctgcctcctgcgaggatctttgtctggtggtcgctagcaaaccaagcctccaggaattggaccttggcatgaacaaattaggtgaccaaggcatcgcaacgttatgcccgaccctgcttctgccttcatgccagattcgtgttttgtggctctggaactgtgatatcaccaccgccggctgccgcgacctctgtcaggtattacgcgcgaagccgtccctcaaagagctgagtcttgcgggtaatgccttgggagatgaaggcgcacgtctcttgtgcgaatcgttattagaaccgggctgccagctcgaaagcctttgggtgaaaagctgttctttcactgctgcttcatgcgtgcattttagtatgatgttgacgcgcaacaagtgtcttgttgagctccaattgagcaataataaattaggtgattgtggcgtgcagcagctttgccaagggttatctcaaccaggtgcggccctccaggttttgtggttgggcgactgtgatgtaggtcatagtggctgtctgagcttagcttccgtgttgcttgtcaaccgttccttacgcgaactcgaccttagtaacaactgcatgggcgaagaagggattctccgtttgatggagagcgttgaacaaccgggatgcgtgcttgaacagttggtcctctatgacatctactggtcggaggagatggatcgtcgtttacgtgccttagaagagcgcaaaccgtcattgcgcgtgattttc

SEQ ID NO: 752 - protein, 468 aa, synthetic construct
  REGION 1..468: note = Variant of RNase inhibitor
MHHHHHHGGSGTMSLDIQCQQLSDARWTELLPLLQQSEVVRLDDCGLTESRCKDISSALQANPRLTELSLCTNELGDAGVTLVLQGLQSGTCKIEKLSLQNCCLTKDGCGVLGDMLRRMPTLRALYLNDNPLGDAGLQLLCQGLVDENCHLEKLQVEYCNLTAASCESLASALRFSRHFKELAVSNNELGEAGVRVLCRGLVESPCQLEVLKLENCGLTSASCEDLCLVVASKPSLQELDLGMNKLGDQGIATLCPTLLLPSCQIRVLWLWNCDITTAGCRDLCQVLRAKPSLKELSLAGNALGDEGARLLCESLLEPGCQLESLWVKSCSFTAASCVHFSMMLTRNKCLVELQLSNNKLGDCGVQQLCQGLSQPGAALQVLWLGDCDVGHSGCLSLASVLLVNRSLRELDLSNNCMGEEGILRLMESVEQPGCVLEQLVLYDIYWSEEMDRRLRALEERKPSLRVIF

SEQ ID NO: 753 - DNA, 1404 bp, synthetic construct
  misc_feature 1..1404: note = Variant of RNase inhibitor
  source 1..1404: mol_type = other DNA
atgcaccatcatcatcatcatggcggtagcggcacgatgtctctggatattcagtgtcaacaattgtcagatgcgcgttggactgaactgttaccgcttctgcaacagtcggaggtggtgcgcctggatgactgcggcctcactgagagtcgctgcaaagacatcagtagtgcactgcaagccaacccacgtttgaccgaattaagcctgtgtacaaatgagctgggtgatgctggagttaccttagtcctgcagggcttgcagtctggcacgtgcaagattgaaaaactgtccctccagaactgttgtctgacgaaggatggttgcggtgtattaggcgacatgcttcgtagtatgcccaccctgcgcgcactgtatctgaatgataacccgttgggcgatgcgggcctccagctgctttgccaggggctggtggacgaaaattgtcacctggagaaactgcaggtggaatactgcaatctcacagcagcctcgtgcgaatttttggcgagcgctctgcgtgcctcgcgccattttaaagaattagcggtttcgaacaacgaactgggtgaagcaggcgtgcgcgtactttgtcgtgggctggtggagagtccatgccaactggaggttctgaaactggaaaattgtggattgacctctgcctcctgcgaggatctttgtctggtggtcgctagcaaaccaagcctccaggaattggaccttggcatgaacaaattaggtgaccaaggcatcgcaacgttatgcccgaccctgcttctgccttcatgccagattcgtgttttgtggctctggaactgtgatatcaccaccgccggctgccgcgacctctgtcaggtattacgcgcgaagccgtccctcaaagagctgagtcttgcgggtaatgccttgggagatgaaggcgcacgtctcttgtgcgaatcgttattagaaccgggctgccagctcgaaagcctttgggtgaaaagctgttctttcactgctgcttcatgccagcattttagtatgatgttgacgcgcaacaagtgtcttgttgagctccaattgagcaataataaattaggtgattgtggcgtgcagcagctttgccaagggttatctcaaccaggtgcggccctccaggttttgtggttgggcgactgtgatgtaggtcatagtggctgtctgtcgttagcttccgtgttgcttgtcaaccgttccttacgcgaactcgaccttagtaacaactgcatgggcgaagaagggattctccgtttgatggagagcgttgaacaaccgggatgcgtgcttgaacagttggtcctctatgacatctactggtcggaggagatggatcgtcgtttacgtgccttagaagagcgcaaaccgtcattgcgcgtgattttc

SEQ ID NO: 754 - protein, 468 aa, synthetic construct
  REGION 1..468: note = Variant of RNase inhibitor
MHHHHHHGGSGTMSLDIQCQQLSDARWTELLPLLQQSEVVRLDDCGLTESRCKDISSALQANPRLTELSLCTNELGDAGVTLVLQGLQSGTCKIEKLSLQNCCLTKDGCGVLGDMLRSMPTLRALYLNDNPLGDAGLQLLCQGLVDENCHLEKLQVEYCNLTAASCEFLASALRASRHFKELAVSNNELGEAGVRVLCRGLVESPCQLEVLKLENCGLTSASCEDLCLVVASKPSLQELDLGMNKLGDQGIATLCPTLLLPSCQIRVLWLWNCDITTAGCRDLCQVLRAKPSLKELSLAGNALGDEGARLLCESLLEPGCQLESLWVKSCSFTAASCQHFSMMLTRNKCLVELQLSNNKLGDCGVQQLCQGLSQPGAALQVLWLGDCDVGHSGCLSLASVLLVNRSLRELDLSNNCMGEEGILRLMESVEQPGCVLEQLVLYDIYWSEEMDRRLRALEERKPSLRVIF

SEQ ID NO: 755 - DNA, 1404 bp, synthetic construct
  misc_feature 1..1404: note = Variant of RNase inhibitor
  source 1..1404: mol_type = other DNA
atgcaccatcatcatcatcatggcggtagcggcacgatgtctctggatattcagtgtcaacaattgtcagatgcgcgttggactgaactgttaccgcttctgcaacagtcggaggtggtgcgcctggatgactgcggcctcactgagagtcgctgcaaagacatcagtgtcgcactgagcgccaacccacgtttgaccgaattaagcctgtgtacaaatgagctgggtgatgctggagttaccttagtcctgcagggcttgcagtctggcacgtgcaagattgaaaaactgtccctccagaactgttgtctgacgaaggatggttgcggtgtattaggcgacatgcttcgttcaatgcccaccctgcgcgcactgtatctgaatgataacccgttgggcgatgcgggcctccagctgctttgccaggggctggtggacgaaaattgtcacctggagaaactgcaggtggaatactgcaatctcacagcagcctcgtgcgaatttttggcgagcgctctgcgtgcatcggttcattttaaagaattagcggtttcgaacaacgaactgggtgaagcaggcgtgcgcgtactttgtcgtgggctggtggagagtccatgccaactggaggttctgaaactggaaaattgtggattgacctctgcctcctgcgaggatctttgtctggtggtcgctagcaaaccaagcctccaggaattggaccttggcatgaacaaattaggtgaccaaggcatcgcaacgttatgcccgaccctgcttagcccttcatgccagattcgtgttttgtggctctggaactgtgatatcaccaccgccggctgccgcgacctctgtcaggtattacgcgcgaagccgtccctcaaagagctgagtcttgcgggtaatgccttgggagatgaaggcgcacgtctcttgtgcgaatcgttattagaaccgggctgccagctcgaaagcctttgggtgaaaagctgttctttcactgctgcttcatgcgtgcattttagtatgatgttgacgcgcaacaagtgtcttgttgagctccaattgagcaataataaattaggtgattgtggcgtgcagctgctttgccaagggttatctcaaccaggtgcggccctccaggttttgtggttgggcgactgtgatgtaggtcatagtggctgtctgagcttagcttccgtgttgcttgtcaaccgttccttacgcgaactcgaccttagtaacaactgcatgggcgaagaagggattctccgtttgatggagagcgttgaacaaccgggatgcgtgcttgaacagttggtcctctatgacatctactggtcggaggagatggatcgtcgtttacgtgccttagaagagcgcaaaccgtcattgcgcgtgattttc

SEQ ID NO: 756 - protein, 468 aa, synthetic construct
  REGION 1..468: note = Variant of RNase inhibitor
MHHHHHHGGSGTMSLDIQCQQLSDARWTELLPLLQQSEVVRLDDCGLTESRCKDISVALSANPRLTELSLCTNELGDAGVTLVLQGLQSGTCKIEKLSLQNCCLTKDGCGVLGDMLRSMPTLRALYLNDNPLGDAGLQLLCQGLVDENCHLEKLQVEYCNLTAASCEFLASALRASVHFKELAVSNNELGEAGVRVLCRGLVESPCQLEVLKLENCGLTSASCEDLCLVVASKPSLQELDLGMNKLGDQGIATLCPTLLSPSCQIRVLWLWNCDITTAGCRDLCQVLRAKPSLKELSLAGNALGDEGARLLCESLLEPGCQLESLWVKSCSFTAASCVHFSMMLTRNKCLVELQLSNNKLGDCGVQLLCQGLSQPGAALQVLWLGDCDVGHSGCLSLASVLLVNRSLRELDLSNNCMGEEGILRLMESVEQPGCVLEQLVLYDIYWSEEMDRRLRALEERKPSLRVIF

SEQ ID NO: 757 - DNA, 1404 bp, synthetic construct
  misc_feature 1..1404: note = Variant of RNase inhibitor
  source 1..1404: mol_type = other DNA
atgcaccatcatcatcatcatggcggtagcggcacgatgtctctggatattcagtgtcaacaattgtcagatgcgcgttgggctgaactgttaccgcttctgcaacagtcggaggtggtgcgcctggatgactgcggcctcactgagagtcgctgcaaagacatcagtagtgcactgcaagccaacccacgtttgaccgaattaagcctgtgtacaaatgagctgggtgatgctggagttaccttagtcctgcagggcttgcagtctggcacgtgcaagattgaaaaactgtccctccagaactgttgtctgacgaaggatggttgcggtgtattaggcgacatgcttcgttcaatgcccaccctgcgcgcactgtatctgaatgataacccgttgggcgatgcgggcctccagctgctttgccaggggctggtggacgaaaattgtcacctggagaaactgcaggtggaatactgcaatctcacagcagcctcgtgcgaatttttggcgagcgctctgcgtgcctcgcgccattttaaagaattagcggtttcgaacaacgaactgggtgaagcaggcgtgcgcgtactttgtcgtgggctggtggagagtccatgccaactggaggttctgaaactggaaaattgtggattgacctctgcctcctgcgaggatctttgtctggtggtcgctagcaaaccaagcctccaggaattggaccttggcatgaacaaattaggtgaccaaggcatcgcaacgttatgcccgaccctgcttagcccttcatgccagattcgtgttttgtggctctggaactgtgatatcaccaccgccggctgccgcgacctctgtcaggtattacgcgcgaagccgtccctcaaagagctgagtcttgcgggtaatgccttgggagatgaaggcgcacgtctcttgtgcgaatcgttattagaaccgggctgccagctcgaaagcctttgggtgaaaagctgttctttcactgctgcttcatgcgtgcattttagtatgatgttgacgcgcaacaagtgtcttgttgagctccaattgagcaataataaattaggtgattgtggcgtgcagcagctttgccaagggttatctcaaccaggtgcggccctccaggttttgtggttgggcgactgtgatgtaggtcatagtggctgtctgagcttagcttccgtgttgcttgtcaaccgttccttacgcgaactcgaccttagtaacaactgcatgggcgaagaagggattctccgtttgatggagagcgttgaacaaccgggatgcgtgcttgaacagttggtcctctatgacatctactggtcggaggagatggatcgtcgtttacgtgccttagaagagcgcaaaccgtcattgcgcgtgattttc

SEQ ID NO: 758 - protein, 468 aa, synthetic construct
  REGION 1..468: note = Variant of RNase inhibitor
MHHHHHHGGSGTMSLDIQCQQLSDARWAELLPLLQQSEVVRLDDCGLTESRCKDISSALQANPRLTELSLCTNELGDAGVTLVLQGLQSGTCKIEKLSLQNCCLTKDGCGVLGDMLRSMPTLRALYLNDNPLGDAGLQLLCQGLVDENCHLEKLQVEYCNLTAASCEFLASALRASRHFKELAVSNNELGEAGVRVLCRGLVESPCQLEVLKLENCGLTSASCEDLCLVVASKPSLQELDLGMNKLGDQGIATLCPTLLSPSCQIRVLWLWNCDITTAGCRDLCQVLRAKPSLKELSLAGNALGDEGARLLCESLLEPGCQLESLWVKSCSFTAASCVHFSMMLTRNKCLVELQLSNNKLGDCGVQQLCQGLSQPGAALQVLWLGDCDVGHSGCLSLASVLLVNRSLRELDLSNNCMGEEGILRLMESVEQPGCVLEQLVLYDIYWSEEMDRRLRALEERKPSLRVIF

SEQ ID NO: 759 - DNA, 1404 bp, synthetic construct
  misc_feature 1..1404: note = Variant of RNase inhibitor
  source 1..1404: mol_type = other DNA
atgcaccatcatcatcatcatggcggtagcggcacgatgtctctggatattcagtgtcaacaattgtcagatgcgcgttggactgaactgttaccgcttctgcaacagtcggaagtggtgcgcctggatgactgcggcctcactgagagtcgctgcaaagacatcagtagtgcactgcaagccaacccacgtttgaccgaattaagcctgtgtacaaatgagctgggtgatgctggagttaccttagtcctgcagggcttgcagtctggcacgtgcaagattgaaaaactgtccctccagaactgttgtctgacgaaggatggttgcggtgtattaggcgacatgcttcgttcaatgcccaccctgcgcgcactgtatctgaatgataacccgttgggcgatgcgggcctccagctgctttgccaggggctggtggacgaaaattgtcacctggagaaactgcaggtggaatactgcaatctcacagcagcctcgtgcgaaagcttggcgagcgctctgcgtgcctcgcgccattttaaagaattagcggtttcgaacaacgaactgggtgaagcaggcgtgcgcgtactttgtcgtgggctggtggagagtccatgccaactggaggttctgaaactggaaaattgtggattgacctctgcctcctgcgaggatctttgtctggtggtcgctagcaaaccaagcctccaggaattggaccttggcatgaacaaattaggtgaccaaggcatcgcaacgttatgcccgaccctgctttatccttcatgccagattcgtgttttgtggctctggaactgtgatatcaccaccgccggctgccgcgacctctgtcaggtattacgcgcgaagccgtccctcaaagagctgagtcttgcgggtaatgccttgggagatgaaggcgcacgtctcttgtgcgaatcgttattagaaccgggctgccagctcgaaagcctttgggtgaaaagctgttctttcactgctgcttcatgccagcattttagtatgatgttgacgcgcaacaagtgtcttgttgagctccaattgagcaataataaattaggtgattgtggcgtgcagctgctttgccaagggttatctcaaccaggtgcggccctccaggttttgtggttgggcgactgtgatgtaggtcatagtggctgtctgagcttagcttccgtgttgcttgtcaaccgttccttacgcgaactcgaccttagtaacaactgcatgggcgaagaagggattctccgtttgatggagagcgttgaacaaccgggatgcgtgcttgaacagttggtcctctatgacatctactggtcggaggagatggatcgtcgtttacgtgccttagaagagcgcaaaccgtcattgcgcgtgattttc

SEQ ID NO: 760 - protein, 468 aa, synthetic construct
  REGION 1..468: note = Variant of RNase inhibitor
MHHHHHHGGSGTMSLDIQCQQLSDARWTELLPLLQQSEVVRLDDCGLTESRCKDISSALQANPRLTELSLCTNELGDAGVTLVLQGLQSGTCKIEKLSLQNCCLTKDGCGVLGDMLRSMPTLRALYLNDNPLGDAGLQLLCQGLVDENCHLEKLQVEYCNLTAASCESLASALRASRHFKELAVSNNELGEAGVRVLCRGLVESPCQLEVLKLENCGLTSASCEDLCLVVASKPSLQELDLGMNKLGDQGIATLCPTLLYPSCQIRVLWLWNCDITTAGCRDLCQVLRAKPSLKELSLAGNALGDEGARLLCESLLEPGCQLESLWVKSCSFTAASCQHFSMMLTRNKCLVELQLSNNKLGDCGVQLLCQGLSQPGAALQVLWLGDCDVGHSGCLSLASVLLVNRSLRELDLSNNCMGEEGILRLMESVEQPGCVLEQLVLYDIYWSEEMDRRLRALEERKPSLRVIF

SEQ ID NO: 761 - DNA, 1404 bp, synthetic construct
  misc_feature 1..1404: note = Variant of RNase inhibitor
  source 1..1404: mol_type = other DNA
atgcaccatcatcatcatcatggcggtagcggcacgatgtctctggatattcagtgtcaacaattgtcagatgcgcgttgggctgaactgttaccgcttctgcaacagtcggaagtggtgcgcctggatgactgcggcctcactgagagtcgctgcaaagacatcagtgtcgcactgcaggccaacccacgtttgaccgaattaagcctgtgtacaaatgagctgggtgatgctggagttaccttagtcctgcagggcttgcagtctggcacgtgcaagattgaaaaactgtccctccagaactgttgtctgacgaaggatggttgcggtgtattaggcgacatgcttcgttcaatgcccaccctgcgcgcactgtatctgaatgataacccgttgggcgatgcgggcgtgcagctgctttgccaggggctggtggacgaaaattgtcacctggagaaactgcaggtggaatactgcaatctcacagcagcctcgtgcgaaagtttggcgagcgctctgcgtgcctcgcgccattttaaagaattagcggtttcgaacaacgaactgggtgaagcaggcgtgcgcgtactttgtcgtgggctggtggagagtccatgccaactggaggttctgaaactggaaaattgtggattgacctctgcctcctgcgaggatctttgtctggtggtcgctagcaaaccaagcctccaggaattggaccttggcatgaacaaattaggtgaccaaggcatcgcaacgttatgcccgaccctgcttctgccttcatgccagattcgtgttttgtggctctggaactgtgatatcaccaccgccggctgccgcgacctctgtcaggtattacgcgcgaagccgtccctcaaagagctgagtcttgcgggtaatgccttgggagatgaaggcgcacgtctcttgtgcgaatcgttattagaaccgggctgccagctcgaaagcctttgggtgaaaagctgttctttcactgctgcttcatgccagcattttagtatgatgttgacgcgcaacaagtgtcttgttgagctccaattgagcaataataaattaggtgattgtggcgtgcagcagctttgccaagggttatctcaaccaggtgcggccctccaggttttgtggttgggcgactgtgatgtaggtcatagtggctgtctgagcttagcttccgtgttgcttgtcaaccgttccttacgcgaactcgaccttagtaacaactgcatgggcgaagaagggattctccgtttgatggagagcgttgaacaaccgggatgcgtgcttgaacagttggtcctctatgacatctactggtcggaggagatggatcgtcgtttacgtgccttagaagagcgcaaaccgtcattgcgcgtgattttc

SEQ ID NO: 762 - protein, 468 aa, synthetic construct
  REGION 1..468: note = Variant of RNase inhibitor
MHHHHHHGGSGTMSLDIQCQQLSDARWAELLPLLQQSEVVRLDDCGLTESRCKDISVALQANPRLTELSLCTNELGDAGVTLVLQGLQSGTCKIEKLSLQNCCLTKDGCGVLGDMLRSMPTLRALYLNDNPLGDAGVQLLCQGLVDENCHLEKLQVEYCNLTAASCESLASALRASRHFKELAVSNNELGEAGVRVLCRGLVESPCQLEVLKLENCGLTSASCEDLCLVVASKPSLQELDLGMNKLGDQGIATLCPTLLLPSCQIRVLWLWNCDITTAGCRDLCQVLRAKPSLKELSLAGNALGDEGARLLCESLLEPGCQLESLWVKSCSFTAASCQHFSMMLTRNKCLVELQLSNNKLGDCGVQQLCQGLSQPGAALQVLWLGDCDVGHSGCLSLASVLLVNRSLRELDLSNNCMGEEGILRLMESVEQPGCVLEQLVLYDIYWSEEMDRRLRALEERKPSLRVIF

SEQ ID NO: 763 - DNA, 1404 bp, synthetic construct
  misc_feature 1..1404: note = Variant of RNase inhibitor
  source 1..1404: mol_type = other DNA
atgcaccatcatcatcatcatggcggtagcggcacgatgtctctggatattcagtgtcaacaattgtcagatgcgcgttggactgaactgttaccgcttctgcaacagtcggcggtggtgcgcctggatgactgcggcctcactgagagtcgctgcaaagacatcagttcggcactgaaggccaacccacgtttgaccgaattaagcctgtgtacaaatgagctgggtgatgctggagttaccttagtcctgcagggcttgcagtctggcacgtgcaagattgaaaaactgtccctccagaactgttgtctgacgaaggatggttgcggtgtattaggcgacatgcttcgtagtatgcccaccctgcgcgcactgtatctgaatgataacccgttgggcgatgcgggcctccagctgctttgccaggggctggtggacgaaaattgtcacctggagaaactgcaggtggaatactgcaatctcacagcagcctcgtgcgaaagcttggcgagcgctctgcgtttctcgcgtcattttaaagaattagcggtttcgaacaacgaactgggtgaagcaggcgtgcgcgtactttgtcgtgggctggtggagagtccatgccaactggaggttctgaaactggaaaattgtggattgacctctgcctcctgcgaggatctttgtctggtggtcgctagcaaaccaagcctccaggaattggaccttggcatgaacaaattaggtgaccaaggcatcgcaacgttatgcccgaccctgcttctgccttcatgccagattcgtgttttgtggctctggaactgtgatatcaccaccgccggctgccgcgacctctgtcaggtattacgcgcgaagccgtccctcaaagagctgagtcttgcgggtaatgccttgggagatgaaggcgcacgtctcttgtgcgaatcgttattagaaccgggctgccagctcgaaagcctttgggtgaaaagctgttctttcactgctgcttcatgcgtgcattttagtatgatgttgacgcgcaacaagtgtcttgttgagctccaattgagcaataataaattaggtgattgtggcgtgcagcagctttgccaagggttatctcaaccaggtgcggccctccaggttttgtggttgggcgactgtgatgtaggtcatagtggctgtctgagcttagcttccgtgttgcttgtcaaccgttccttacgcgaactcgaccttagtaacaactgcatgggcgaagaagggattctccgtttgatggagagcgttgaacaaccgggatgcgtgcttgaacagttggtcctctatgacatctactggtcggaggagatggatcgtcgtttacgtgccttagaagagcgcaaaccgtcattgcgcgtgattttc

SEQ ID NO: 764 - protein, 468 aa, synthetic construct
  REGION 1..468: note = Variant of RNase inhibitor
MHHHHHHGGSGTMSLDIQCQQLSDARWTELLPLLQQSAVVRLDDCGLTESRCKDISSALKANPRLTELSLCTNELGDAGVTLVLQGLQSGTCKIEKLSLQNCCLTKDGCGVLGDMLRSMPTLRALYLNDNPLGDAGLQLLCQGLVDENCHLEKLQVEYCNLTAASCESLASALRFSRHFKELAVSNNELGEAGVRVLCRGLVESPCQLEVLKLENCGLTSASCEDLCLVVASKPSLQELDLGMNKLGDQGIATLCPTLLLPSCQIRVLWLWNCDITTAGCRDLCQVLRAKPSLKELSLAGNALGDEGARLLCESLLEPGCQLESLWVKSCSFTAASCVHFSMMLTRNKCLVELQLSNNKLGDCGVQQLCQGLSQPGAALQVLWLGDCDVGHSGCLSLASVLLVNRSLRELDLSNNCMGEEGILRLMESVEQPGCVLEQLVLYDIYWSEEMDRRLRALEERKPSLRVIF

SEQ ID NO: 765 - DNA, 1404 bp, synthetic construct
  misc_feature 1..1404: note = Variant of RNase inhibitor
  source 1..1404: mol_type = other DNA
atgcaccatcatcatcatcatggcggtagcggcacgatgtctctggatattcagtgtcaacaattgtcagatgcgcgttggactgaactgttaccgcttctgcaacagtcggcggtggtgcgcctggatgactgcggcctcactgagagtcgctgcaaagacatcagttcggcactgaaggccaacccacgtttgaccgaattaagcctgtgtacaaatgagctgggtgatgctggagttaccttagtcctgcagggcttgcagtctggcacgtgcaagattgaaaaactgtccctccagaactgttgtctgacgaaggatggttgcggtgtattaggcgacatgcttcgtagtatgcccaccctgcgcgcactgtatctgaatgataacccgttgggcgatgcgggcctccagctgctttgccaggggctggtggacgaaaattgtcacctggagaaactgcaggtggaatactgcaatctcacagcagcctcgtgcgaaagtttggcgagcgctctgcgtgcctcgcgccattttaaagaattagcggtttcgaacaacgaactgggtgaagcaggcgtgcgcgtactttgtcgtgggctggtggagagtccatgccaactggaggttctgaaactggaaaattgtggattgacctctgcctcctgcgaggatctttgtctggtggtcgctagcaaaccaagcctccaggaattggaccttggcatgaacaaattaggtgaccaaggcatcgcaacgttatgcccgaccctgcttagcccttcatgccagattcgtgttttgtggctctggaactgtgatatcaccaccgccggctgccgcgacctctgtcaggtattacgcgcgaagccgtccctcaaagagctgagtcttgcgggtaatgccttgggagatgaaggcgcacgtctcttgtgcgaatcgttattagaaccgggctgccagctcgaaagcctttgggtgaaaagctgttctttcactgctgcttcatgccagcattttagtatgatgttgacgcgcaacaagtgtcttgttgagctccaattgagcaataataaattaggtgattgtggcgtgcaggcgctttgccaagggttatctcaaccaggtgcggccctccaggttttgtggttgggcgactgtgatgtaggtcatagtggctgtctggcgttagcttccgtgttgcttgtcaaccgttccttacgcgaactcgaccttagtaacaactgcatgggcgaagaagggattctccgtttgatggagagcgttgaacaaccgggatgcgtgcttgaacagttggtcctctatgacatctactggtcggaggagatggatcgtcgtttacgtgccttagaagagcgcaaaccgtcattgcgcgtgattttc

SEQ ID NO: 766 - protein, 468 aa, synthetic construct
  REGION 1..468: note = Variant of RNase inhibitor
MHHHHHHGGSGTMSLDIQCQQLSDARWTELLPLLQQSAVVRLDDCGLTESRCKDISSALKANPRLTELSLCTNELGDAGVTLVLQGLQSGTCKIEKLSLQNCCLTKDGCGVLGDMLRSMPTLRALYLNDNPLGDAGLQLLCQGLVDENCHLEKLQVEYCNLTAASCESLASALRASRHFKELAVSNNELGEAGVRVLCRGLVESPCQLEVLKLENCGLTSASCEDLCLVVASKPSLQELDLGMNKLGDQGIATLCPTLLSPSCQIRVLWLWNCDITTAGCRDLCQVLRAKPSLKELSLAGNALGDEGARLLCESLLEPGCQLESLWVKSCSFTAASCQHFSMMLTRNKCLVELQLSNNKLGDCGVQALCQGLSQPGAALQVLWLGDCDVGHSGCLALASVLLVNRSLRELDLSNNCMGEEGILRLMESVEQPGCVLEQLVLYDIYWSEEMDRRLRALEERKPSLRVIF

SEQ ID NO: 767 - DNA, 1404 bp, synthetic construct
  misc_feature 1..1404: note = Variant of RNase inhibitor
  source 1..1404: mol_type = other DNA
atgcaccatcatcatcatcatggcggtagcggcacgatgtctctggatattcagtgtcaacaattgtcagatgcgcgttggactgaactgttaccgcttctgcaacagtcggaagtggtgcgcctggatgactgcggcctcactgagagtcgctgcaaagacatcagtgtcgcactgaaggccaacccacgtttgaccgaattaagcctgtgtacaaatgagctgggtgatgctggagttaccttagtcctgcagggcttgcagtctggcacgtgcaagattgaaaaactgtccctccagaactgttgtctgacgaaggatggttgcggtgtattaggcgacatgcttcgtagtatgcccaccctgcgcgcactgtatctgaatgataacccgttgggcgatgcgggcctccagctgctttgccaggggctggtggacgaaaattgtcacctggagaaactgcaggtggaatactgcaatctcacagcagcctcgtgcgaaagcttggcgagcgctctgcgtgcatcgcgtcattttaaagaattagcggtttcgaacaacgaactgggtgaagcaggcgtgcgcgtactttgtcgtgggctggtggagagtccatgccaactggaggttctgaaactggaaaattgtggattgacctctgcctcctgcgaggatctttgtctggtggtcgctagcaaaccaagcctccaggaattggaccttggcatgaacaaattaggtgaccaaggcatcgcaacgttatgcccgaccctgcttagcccttcatgccagattcgtgttttgtggctctggaactgtgatatcaccaccgccggctgccgcgacctctgtcaggtattacgcgcgaagccgtccctcaaagagctgagtcttgcgggtaatgccttgggagatgaaggcgcacgtctcttgtgcgaatcgttattagaaccgggctgccagctcgaaagcctttgggtgaaaagctgttctttcactgctgcttcatgccagcattttagtatgatgttgacgcgcaacaagtgtcttgttgagctccaattgagcaataataaattaggtgatatgggcgtgcaggtgctttgccaagggttatctcaaccaggtgcggccctccaggttttgtggttgggcgactgtgatgtaggtcatagtggctgtctgagcttagcttccgtgttgcttgtcaaccgttccttacgcgaactcgaccttagtaacaactgcatgggcgaagaagggattctccgtttgatggagagcgttgaacaaccgggatgcgtgcttgaacagttggtcctctatgacatctactggtcggaggagatggatcgtcgtttacgtgccttagaagagcgcaaaccgtcattgcgcgtgattttc

SEQ ID NO: 768 - protein, 468 aa, synthetic construct
  REGION 1..468: note = Variant of RNase inhibitor
MHHHHHHGGSGTMSLDIQCQQLSDARWTELLPLLQQSEVVRLDDCGLTESRCKDISVALKANPRLTELSLCTNELGDAGVTLVLQGLQSGTCKIEKLSLQNCCLTKDGCGVLGDMLRSMPTLRALYLNDNPLGDAGLQLLCQGLVDENCHLEKLQVEYCNLTAASCESLASALRASRHFKELAVSNNELGEAGVRVLCRGLVESPCQLEVLKLENCGLTSASCEDLCLVVASKPSLQELDLGMNKLGDQGIATLCPTLLSPSCQIRVLWLWNCDITTAGCRDLCQVLRAKPSLKELSLAGNALGDEGARLLCESLLEPGCQLESLWVKSCSFTAASCQHFSMMLTRNKCLVELQLSNNKLGDMGVQVLCQGLSQPGAALQVLWLGDCDVGHSGCLSLASVLLVNRSLRELDLSNNCMGEEGILRLMESVEQPGCVLEQLVLYDIYWSEEMDRRLRALEERKPSLRVIF

SEQ ID NO: 769 - DNA, 1404 bp, synthetic construct
  misc_feature 1..1404: note = Variant of RNase inhibitor
  source 1..1404: mol_type = other DNA
atgcaccatcatcatcatcatggcggtagcggcacgatgtctctggatattcagtgtcaacaattgtcagatgcgcgttggactgaactgttaccgcttctgcaacagtcggaggtggtgcgcctggatgactgcggcctcactgagagtcgctgcaaagacatcagttcggcactgaaggccaacccacgtttgaccgaattaagcctgtgtacaaatgagctgggtgatgctggagttaccttagtcctgcagggcttgcagtctggcacgtgcaagattgaaaaactgtccctccagaactgttgtctgacgaaggatggttgcggtgtattaggcgacatgcttcgttcaatgcccaccctgcgcgcactgtatctgaatgataacccgttgggcgatgcgggcctccagctgctttgccaggggctggtggacgaaaattgtcacctggagaaactgcaggtggaatactgcaatctcacagcagcctcgtgcgaaagtttggcgagcgctctgcgtgcctcgcgccattttaaagaattagcggtttcgaacaacgaactgggtgaagcaggcgtgcgcgtactttgtcgtgggctggtggagagtccatgccaactggaggttctgaaactggaaaattgtggattgacctctgcctcctgcgaggatctttgtctggtggtcgctagcaaaccaagcctccaggaattggaccttggcatgaacaaattaggtgaccaaggcatcgcaacgttatgcccgaccctgcttctgccttcatgccagattcgtgttttgtggctctggaactgtgatatcaccaccgccggctgccgcgacctctgtcaggtattacgcgcgaagccgtccctcaaagagctgagtcttgcgggtaatgccttgggagatgaaggcgcacgtctcttgtgcgaatcgttattagaaccgggctgccagctcgaaagcctttgggtgaaaagctgttctttcactgctgcttcatgccagcattttagtatgatgttgacgcgcaacaagtgtcttgttgagctccaattgagcaataataaattaggtgattgtggcgtgcaggcgctttgccaagggttatctcaaccaggtgcggccctccaggttttgtggttgggcgactgtgatgtaggtcatagtggctgtctgtcgttagcttccgtgttgcttgtcaaccgttccttacgcgaactcgaccttagtaacaactgcatgggcgaagaagggattctccgtttgatggagagcgttgaacaaccgggatgcgtgcttgaacagttggtcctctatgacatctactggtcggaggagatggatcgtcgtttacgtgccttagaagagcgcaaaccgtcattgcgcgtgattttc

SEQ ID NO: 770 - protein, 468 aa, synthetic construct
  REGION 1..468: note = Variant of RNase inhibitor
MHHHHHHGGSGTMSLDIQCQQLSDARWTELLPLLQQSEVVRLDDCGLTESRCKDISSALKANPRLTELSLCTNELGDAGVTLVLQGLQSGTCKIEKLSLQNCCLTKDGCGVLGDMLRSMPTLRALYLNDNPLGDAGLQLLCQGLVDENCHLEKLQVEYCNLTAASCESLASALRASRHFKELAVSNNELGEAGVRVLCRGLVESPCQLEVLKLENCGLTSASCEDLCLVVASKPSLQELDLGMNKLGDQGIATLCPTLLLPSCQIRVLWLWNCDITTAGCRDLCQVLRAKPSLKELSLAGNALGDEGARLLCESLLEPGCQLESLWVKSCSFTAASCQHFSMMLTRNKCLVELQLSNNKLGDCGVQALCQGLSQPGAALQVLWLGDCDVGHSGCLSLASVLLVNRSLRELDLSNNCMGEEGILRLMESVEQPGCVLEQLVLYDIYWSEEMDRRLRALEERKPSLRVIF

SEQ ID NO: 771 - DNA, 1404 bp, synthetic construct
  misc_feature 1..1404: note = Variant of RNase inhibitor
  source 1..1404: mol_type = other DNA
atgcaccatcatcatcatcatggcggtagcggcacgatgtctctggatattcagtgtcaacaattgtcagatgcgcgttgggctgaactgttaccgcttctgcaacagtcggcggtggtgcgcctggatgactgcggcctcactgagagtcgctgcaaagacatcagttcggcactgaaggccaacccacgtttgaccgaattaagcctgtgtacaaatgagctgggtgatgctggagttaccttagtcctgcagggcttgcagtctggcacgtgcaagattgaaaaactgtccctccagaactgttgtctgacgaaggatggttgcggtgtattaggcgacatgcttcgttcaatgcccaccctgcgcgcactgtatctgaatgataacccgttgggcgatgcgggcctccagctgctttgccaggggctggtggacgaaaattgtcacctggagaaactgcaggtggaatactgcaatctcacagcagcctcgtgcgaaagcttggcgagcgctctgcgtgcatcgcgtcattttaaagaattagcggtttcgaacaacgaactgggtgaagcaggcgtgcgcgtactttgtcgtgggctggtggagagtccatgccaactggaggttctgaaactggaaaattgtggattgacctctgcctcctgcgaggatctttgtctggtggtcgctagcaaaccaagcctccaggaattggaccttggcatgaacaaattaggtgaccaaggcatcgcaacgttatgcccgaccctgcttagcccttcatgccagattcgtgttttgtggctctggaactgtgatatcaccaccgccggctgccgcgacctctgtcaggtattacgcgcgaagccgtccctcaaagagctgagtcttgcgggtaatgccttgggagatgaaggcgcacgtctcttgtgcgaatcgttattagaaccgggctgccagctcgaaagcctttgggtgaaaagctgttctttcactgctgcttcatgccagcattttagtatgatgttgacgcgcaacaagtgtcttgttgagctccaattgagcaataataaattaggtgattgtggcgtgcagctgctttgccaagggttatctcaaccaggtgcggccctccaggttttgtggttgggcgactgtgatgtaggtcatagtggctgtctgagcttagcttccgtgttgcttgtcaaccgttccttacgcgaactcgaccttagtaacaactgcatgggcgaagaagggattctccgtttgatggagagcgttgaacaaccgggatgcgtgcttgaacagttggtcctctatgacatctactggtcggaggagatggatcgtcgtttacgtgccttagaagagcgcaaaccgtcattgcgcgtgattttc

SEQ ID NO: 772 - protein, 468 aa, synthetic construct
  REGION 1..468: note = Variant of RNase inhibitor
MHHHHHHGGSGTMSLDIQCQQLSDARWAELLPLLQQSAVVRLDDCGLTESRCKDISSALKANPRLTELSLCTNELGDAGVTLVLQGLQSGTCKIEKLSLQNCCLTKDGCGVLGDMLRSMPTLRALYLNDNPLGDAGLQLLCQGLVDENCHLEKLQVEYCNLTAASCESLASALRASRHFKELAVSNNELGEAGVRVLCRGLVESPCQLEVLKLENCGLTSASCEDLCLVVASKPSLQELDLGMNKLGDQGIATLCPTLLSPSCQIRVLWLWNCDITTAGCRDLCQVLRAKPSLKELSLAGNALGDEGARLLCESLLEPGCQLESLWVKSCSFTAASCQHFSMMLTRNKCLVELQLSNNKLGDCGVQLLCQGLSQPGAALQVLWLGDCDVGHSGCLSLASVLLVNRSLRELDLSNNCMGEEGILRLMESVEQPGCVLEQLVLYDIYWSEEMDRRLRALEERKPSLRVIF

SEQ ID NO: 773 - DNA, 1404 bp, synthetic construct
  misc_feature 1..1404: note = Variant of RNase inhibitor
  source 1..1404: mol_type = other DNA
atgcaccatcatcatcatcatggcggtagcggcacgatgtctctggatattcagtgtcaacaattgtcagatgcgcgttggactgaactgttaccgcttctgcaacagtcggaagtggtgcgcctggatgactgcggcctcactgagagtcgctgcaaagacatcagttcggcactgagcgccaacccacgtttgaccgaattaagcctgtgtacaaatgagctgggtgatgctggagttaccttagtcctgcagggcttgcagtctggcacgtgcaagattgaaaaactgtccctccagaactgttgtctgacgaaggatggttgcggtgtattaggcgacatgcttcgttcaatgcccaccctgcgcgcactgtatctgaatgataacccgttgggcgatgcgggcctccagctgctttgccaggggctggtggacgaaaattgtcacctggagaaactgcaggtggaatactgcaatctcacagcagcctcgtgcgaatttttggcgagcgctctgcgtgcctcgcgccattttaaagaattagcggtttcgaacaacgaactgggtgaagcaggcgtgcgcgtactttgtcgtgggctggtggagagtccatgccaactggaggttctgaaactggaaaattgtggattgacctctgcctcctgcgaggatctttgtctggtggtcgctagcaaaccaagcctccaggaattggaccttggcatgaacaaattaggtgaccaaggcatcgcaacgttatgcccgaccctgcttcacccttcatgccagattcgtgttttgtggctctggaactgtgatatcaccaccgccggctgccgcgacctctgtcaggtattacgcgcgaagccgtccctcaaagagctgagtcttgcgggtaatgccttgggagatgaaggcgcacgtctcttgtgcgaatcgttattagaaccgggctgccagctcgaaagcctttgggtgaaaagctgttctttcactgctgcttcatgccagcattttagtatgatgttgacgcgcaacaagtgtcttgttgagctccaattgagcaataataaattaggtgattgtggcgtgcagcagctttgccaagggttatctcaaccaggtgcggccctccaggttttgtggttgggcgactgtgatgtaggtcatagtggctgtctgagcttagcttccgtgttgcttgtcaaccgttccttacgcgaactcgaccttagtaacaactgcatgggcgaagaagggattctccgtttgatggagagcgttgaacaaccgggatgcgtgcttgaacagttggtcctctatgacatctactggtcggaggagatggatcgtcgtttacgtgccttagaagagcgcaaaccgtcattgcgcgtgattttc

SEQ ID NO: 774 - protein, 468 aa, synthetic construct
  REGION 1..468: note = Variant of RNase inhibitor
MHHHHHHGGSGTMSLDIQCQQLSDARWTELLPLLQQSEVVRLDDCGLTESRCKDISSALSANPRLTELSLCTNELGDAGVTLVLQGLQSGTCKIEKLSLQNCCLTKDGCGVLGDMLRSMPTLRALYLNDNPLGDAGLQLLCQGLVDENCHLEKLQVEYCNLTAASCEFLASALRASRHFKELAVSNNELGEAGVRVLCRGLVESPCQLEVLKLENCGLTSASCEDLCLVVASKPSLQELDLGMNKLGDQGIATLCPTLLHPSCQIRVLWLWNCDITTAGCRDLCQVLRAKPSLKELSLAGNALGDEGARLLCESLLEPGCQLESLWVKSCSFTAASCQHFSMMLTRNKCLVELQLSNNKLGDCGVQQLCQGLSQPGAALQVLWLGDCDVGHSGCLSLASVLLVNRSLRELDLSNNCMGEEGILRLMESVEQPGCVLEQLVLYDIYWSEEMDRRLRALEERKPSLRVIF

SEQ ID NO: 775 - DNA, 1404 bp, synthetic construct
  misc_feature 1..1404: note = Variant of RNase inhibitor
  source 1..1404: mol_type = other DNA
atgcaccatcatcatcatcatggcggtagcggcacgatgtctctggatattcagtgtcaacaattgtcagatgcgcgttggactgaactgttaccgcttctgcaacagtcggaagtggtgcgcctggatgactgcggcctcactgagagtcgctgcaaagacatcagtagtgcactgcaagccaacccacgtttgaccgaattaagcctgtgtacaaatgagctgggtgatgctggagttaccttagtcctgcagggcttgcagtctggcacgtgcaagattgaaaaactgtccctccagaactgttgtctgacgaaggatggttgcggtgtattaggcgacatgcttcgtagtatgcccaccctgcgcgcactgtatctgaatgataacccgttgggcgatgcgggcctccagctgctttgccaggggctggtggacgaaaattgtcacctggagaaactgcaggtggaatactgcaatctcacagcagcctcgtgcgaaagcttggcgagcgctctgcgtgcctcgcgccattttaaagaattagcggtttcgaacaacgaactgggtgaagcaggcgtgcgcgtactttgtcgtgggctggtggagagtccatgccaactggaggttctgaaactggaaaattgtggattgacctctgcctcctgcgaggatctttgtctggtggtcgctagcaaaccaagcctccaggaattggaccttggcatgaacaaattaggtgaccaaggcatcgcaacgttatgcccgaccctgcttctgccttcatgccagattcgtgttttgtggctctggaactgtgatatcaccaccgccggctgccgcgacctctgtcaggtattacgcgcgaagccgtccctcaaagagctgagtcttgcgggtaatgccttgggagatgaaggcgcacgtctcttgtgcgaatcgttattagaaccgggctgccagctcgaaagcctttgggtgaaaagctgttctttcactgctgcttcatgccagcattttagtatgatgttgacgcgcaacaagtgtcttgttgagctccaattgagcaataataaattaggtgatatgggcgtgcaggcgctttgccaagggttatctcaaccaggtgcggccctccaggttttgtggttgggcgactgtgatgtaggtcatagtggctgtctgagcttagcttccgtgttgcttgtcaaccgttccttacgcgaactcgaccttagtaacaactgcatgggcgaagaagggattctccgtttgatggagagcgttgaacaaccgggatgcgtgcttgaacagttggtcctctatgacatctactggtcggaggagatggatcgtcgtttacgtgccttagaagagcgcaaaccgtcattgcgcgtgattttc

SEQ ID NO: 776 - protein, 468 aa, synthetic construct
  REGION 1..468: note = Variant of RNase inhibitor
MHHHHHHGGSGTMSLDIQCQQLSDARWTELLPLLQQSEVVRLDDCGLTESRCKDISSALQANPRLTELSLCTNELGDAGVTLVLQGLQSGTCKIEKLSLQNCCLTKDGCGVLGDMLRSMPTLRALYLNDNPLGDAGLQLLCQGLVDENCHLEKLQVEYCNLTAASCESLASALRASRHFKELAVSNNELGEAGVRVLCRGLVESPCQLEVLKLENCGLTSASCEDLCLVVASKPSLQELDLGMNKLGDQGIATLCPTLLLPSCQIRVLWLWNCDITTAGCRDLCQVLRAKPSLKELSLAGNALGDEGARLLCESLLEPGCQLESLWVKSCSFTAASCQHFSMMLTRNKCLVELQLSNNKLGDMGVQALCQGLSQPGAALQVLWLGDCDVGHSGCLSLASVLLVNRSLRELDLSNNCMGEEGILRLMESVEQPGCVLEQLVLYDIYWSEEMDRRLRALEERKPSLRVIF

SEQ ID NO: 777 - DNA, 1404 bp, synthetic construct
  misc_feature 1..1404: note = Variant of RNase inhibitor
  source 1..1404: mol_type = other DNA
atgcaccatcatcatcatcatggcggtagcggcacgatgtctctggatattcagtgtcaacaattgtcagatgcgcgttggactgaactgttaccgcttctgcaacagtcggaagtggtgcgcctggatgactgcggcctcactgagagtcgctgcaaagacatcagtagtgcactgcaagccaacccacgtttgaccgaattaagcctgtgtacaaatgagctgggtgatgctggagttaccttagtcctgcagggcttgcagtctggcacgtgcaagattgaaaaactgtccctccagaactgttgtctgacgaaggatggttgcggtgtattaggcgacatgcttcgtagtatgcccaccctgcgcgcactgtatctgaatgataacccgttgggcgatgcgggcctccagctgctttgccaggggctggtggacgaaaattgtcacctggagaaactgcaggtggaatactgcaatctcacagcagcctcgtgcgaaagtttggcgagcgctctgcgtgcatcggttcattttaaagaattagcggtttcgaacaacgaactgggtgaagcaggcgtgcgcgtactttgtcgtgggctggtggagagtccatgccaactggaggttctgaaactggaaaattgtggattgacctctgcctcctgcgaggatctttgtctggtggtcgctagcaaaccaagcctccaggaattggaccttggcatgaacaaattaggtgaccaaggcatcgcaacgttatgcccgaccctgctttatccttcatgccagattcgtgttttgtggctctggaactgtgatatcaccaccgccggctgccgcgacctctgtcaggtattacgcgcgaagccgtccctcaaagagctgagtcttgcgggtaatgccttgggagatgaaggcgcacgtctcttgtgcgaatcgttattagaaccgggctgccagctcgaaagcctttgggtgaaaagctgttctttcactgctgcttcatgccagcattttagtatgatgttgacgcgcaacaagtgtcttgttgagctccaattgagcaataataaattaggtgatatgggcgtgcaggtgctttgccaagggttatctcaaccaggtgcggccctccaggttttgtggttgggcgactgtgatgtaggtcatagtggctgtctgtcgttagcttccgtgttgcttgtcaaccgttccttacgcgaactcgaccttagtaacaactgcatgggcgaagaagggattctccgtttgatggagagcgttgaacaaccgggatgcgtgcttgaacagttggtcctctatgacatctactggtcggaggagatggatcgtcgtttacgtgccttagaagagcgcaaaccgtcattgcgcgtgattttc

SEQ ID NO: 778 - protein, 468 aa, synthetic construct
  REGION 1..468: note = Variant of RNase inhibitor
MHHHHHHGGSGTMSLDIQCQQLSDARWTELLPLLQQSEVVRLDDCGLTESRCKDISSALQANPRLTELSLCTNELGDAGVTLVLQGLQSGTCKIEKLSLQNCCLTKDGCGVLGDMLRSMPTLRALYLNDNPLGDAGLQLLCQGLVDENCHLEKLQVEYCNLTAASCESLASALRASVHFKELAVSNNELGEAGVRVLCRGLVESPCQLEVLKLENCGLTSASCEDLCLVVASKPSLQELDLGMNKLGDQGIATLCPTLLYPSCQIRVLWLWNCDITTAGCRDLCQVLRAKPSLKELSLAGNALGDEGARLLCESLLEPGCQLESLWVKSCSFTAASCQHFSMMLTRNKCLVELQLSNNKLGDMGVQVLCQGLSQPGAALQVLWLGDCDVGHSGCLSLASVLLVNRSLRELDLSNNCMGEEGILRLMESVEQPGCVLEQLVLYDIYWSEEMDRRLRALEERKPSLRVIF

SEQ ID NO: 779 - DNA, 1404 bp, synthetic construct
  misc_feature 1..1404: note = Variant of RNase inhibitor
  source 1..1404: mol_type = other DNA
atgcaccatcatcatcatcatggcggtagcggcacgatgtctctggatattcagtgtcaacaattgtcagatgcgcgttggactgaactgttaccgcttctgcaacagtcggcggtggtgcgcctggatgactgcggcctcactgagagtcgctgcaaagacatcagtagtgcactgcaagccaacccacgtttgaccgaattaagcctgtgtacaaatgagctgggtgatgctggagttaccttagtcctgcagggcttgcagtctggcacgtgcaagattgaaaaactgtccctccagaactgttgtctgacgaaggatggttgcggtgtattaggcgacatgcttcgttcaatgcccaccctgcgcgcactgtatctgaatgataacccgttgggcgatgcgggcctccagctgctttgccaggggctggtggacgaaaattgtcacctggagaaactgcaggtggaatactgcaatctcacagcagcctcgtgcgaaagcttggcgagcgctctgcgtgcctcgcgccattttaaagaattagcggtttcgaacaacgaactgggtgaagcaggcgtgcgcgtactttgtcgtgggctggtggagagtccatgccaactggaggttctgaaactggaaaattgtggattgacctctgcctcctgcgaggatctttgtctggtggtcgctagcaaaccaagcctccaggaattggaccttggcatgaacaaattaggtgaccaaggcatcgcaacgttatgcccgaccctgcttctgccttcatgccagattcgtgttttgtggctctggaactgtgatatcaccaccgccggctgccgcgacctctgtcaggtattacgcgcgaagccgtccctcaaagagctgagtcttgcgggtaatgccttgggagatgaaggcgcacgtctcttgtgcgaatcgttattagaaccgggctgccagctcgaaagcctttgggtgaaaagctgttctttcactgctgcttcatgccagcattttagtatgatgttgacgcgcaacaagtgtcttgttgagctccaattgagcaataataaattaggtgattgtggcgtgcagcagctttgccaagggttatctcaaccaggtgcggccctccaggttttgtggttgggcgactgtgatgtaggtcatagtggctgtctgagcttagcttccgtgttgcttgtcaaccgttccttacgcgaactcgaccttagtaacaactgcatgggcgaagaagggattctccgtttgatggagagcgttgaacaaccgggatgcgtgcttgaacagttggtcctctatgacatctactggtcggaggagatggatcgtcgtttacgtgccttagaagagcgcaaaccgtcattgcgcgtgattttc

SEQ ID NO: 780 - protein, 468 aa, synthetic construct
  REGION 1..468: note = Variant of RNase inhibitor
MHHHHHHGGSGTMSLDIQCQQLSDARWTELLPLLQQSAVVRLDDCGLTESRCKDISSALQANPRLTELSLCTNELGDAGVTLVLQGLQSGTCKIEKLSLQNCCLTKDGCGVLGDMLRSMPTLRALYLNDNPLGDAGLQLLCQGLVDENCHLEKLQVEYCNLTAASCESLASALRASRHFKELAVSNNELGEAGVRVLCRGLVESPCQLEVLKLENCGLTSASCEDLCLVVASKPSLQELDLGMNKLGDQGIATLCPTLLLPSCQIRVLWLWNCDITTAGCRDLCQVLRAKPSLKELSLAGNALGDEGARLLCESLLEPGCQLESLWVKSCSFTAASCQHFSMMLTRNKCLVELQLSNNKLGDCGVQQLCQGLSQPGAALQVLWLGDCDVGHSGCLSLASVLLVNRSLRELDLSNNCMGEEGILRLMESVEQPGCVLEQLVLYDIYWSEEMDRRLRALEERKPSLRVIF

SEQ ID NO: 781 - DNA, 1404 bp, synthetic construct
  misc_feature 1..1404: note = Variant of RNase inhibitor
  source 1..1404: mol_type = other DNA
atgcaccatcatcatcatcatggcggtagcggcacgatgtctctggatattcagtgtcaacaattgtcagatgcgcgttgggctgaactgttaccgcttctgcaacagtcggaggtggtgcgcctggatgactgcggcctcactgagagtcgctgcaaagacatcagttcggcactgaaggccaacccacgtttgaccgaattaagcctgtgtacaaatgagctgggtgatgctggagttaccttagtcctgcagggcttgcagtctggcacgtgcaagattgaaaaactgtccctccagaactgttgtctgacgaaggatggttgcggtgtattaggcgacatgcttcgtcgtatgcccaccctgcgcgcactgtatctgaatgataacccgttgggcgatgcgggcctccagctgctttgccaggggctggtggacgaaaattgtcacctggagaaactgcaggtggaatactgcaatctcacagcagcctcgtgcgaaagtttggcgagcgctctgcgtgcatcggttcattttaaagaattagcggtttcgaacaacgaactgggtgaagcaggcgtgcgcgtactttgtcgtgggctggtggagagtccatgccaactggaggttctgaaactggaaaattgtggattgacctctgcctcctgcgaggatctttgtctggtggtcgctagcaaaccaagcctccaggaattggaccttggcatgaacaaattaggtgaccaaggcatcgcaacgttatgcccgaccctgctttatccttcatgccagattcgtgttttgtggctctggaactgtgatatcaccaccgccggctgccgcgacctctgtcaggtattacgcgcgaagccgtccctcaaagagctgagtcttgcgggtaatgccttgggagatgaaggcgcacgtctcttgtgcgaatcgttattagaaccgggctgccagctcgaaagcctttgggtgaaaagctgttctttcactgctgcttcatgccagcattttagtatgatgttgacgcgcaacaagtgtcttgttgagctccaattgagcaataataaattaggtgattgtggcgtgcagcagctttgccaagggttatctcaaccaggtgcggccctccaggttttgtggttgggcgactgtgatgtaggtcatagtggctgtctgagcttagcttccgtgttgcttgtcaaccgttccttacgcgaactcgaccttagtaacaactgcatgggcgaagaagggattctccgtttgatggagagcgttgaacaaccgggatgcgtgcttgaacagttggtcctctatgacatctactggtcggaggagatggatcgtcgtttacgtgccttagaagagcgcaaaccgtcattgcgcgtgattttc

SEQ ID NO: 782 - protein, 468 aa, synthetic construct
  REGION 1..468: note = Variant of RNase inhibitor
MHHHHHHGGSGTMSLDIQCQQLSDARWAELLPLLQQSEVVRLDDCGLTESRCKDISSALKANPRLTELSLCTNELGDAGVTLVLQGLQSGTCKIEKLSLQNCCLTKDGCGVLGDMLRRMPTLRALYLNDNPLGDAGLQLLCQGLVDENCHLEKLQVEYCNLTAASCESLASALRASVHFKELAVSNNELGEAGVRVLCRGLVESPCQLEVLKLENCGLTSASCEDLCLVVASKPSLQELDLGMNKLGDQGIATLCPTLLYPSCQIRVLWLWNCDITTAGCRDLCQVLRAKPSLKELSLAGNALGDEGARLLCESLLEPGCQLESLWVKSCSFTAASCQHFSMMLTRNKCLVELQLSNNKLGDCGVQQLCQGLSQPGAALQVLWLGDCDVGHSGCLSLASVLLVNRSLRELDLSNNCMGEEGILRLMESVEQPGCVLEQLVLYDIYWSEEMDRRLRALEERKPSLRVIF

SEQ ID NO: 783 - DNA, 1404 bp, synthetic construct
  misc_feature 1..1404: note = Variant of RNase inhibitor
  source 1..1404: mol_type = other DNA
atgcaccatcatcatcatcatggcggtagcggcacgatgtctctggatattcagtgtcaacaattgtcagatgcgcgttgggctgaactgttaccgcttctgcgccagtcggaggtggtgcgcctggatgactgcggcctcactgagagtcgctgcaaagacatcagttcggcactgagcgccaacccacgtttgaccgaattaagcctgtgtacaaatgagctgggtgatgctggagttaccttagtcctgcagggcttgcagtctggcacgtgcaagattgaaaaactgtccctccagaactgttgtctgacgaaggatggttgcggtgtattaggcgacatgcttcgtcgtatgcccaccctgcgcgcactgtatctgaatgataacccgttgggcgatgcgggcctccagctgctttgccaggggctggtggacgaaaattgtcacctggagaaactgcaggtggaatactgcaatctcacagcagcctcgtgcgaaagtttggcgagcgctctgcgtttctcgcgtcattttaaagaattagcggtttcgaacaacgaactgggtgaagcaggcgtgcgcgtactttgtcgtgggctggtggagagtccatgccaactggaggttctgaaactggaaaattgtggattgacctctgcctcctgcgaggatctttgtctggtggtcgctagcaaaccaagcctccaggaattggaccttggcatgaacaaattaggtgaccaaggcatcgcaacgttatgcccgaccctgctttatccttcatgccagattcgtgttttgtggctctggaactgtgatatcaccaccgccggctgccgcgacctctgtcaggtattacgcgcgaagccgtccctcaaagagctgagtcttgcgggtaatgccttgggagatgaaggcgcacgtctcttgtgcgaatcgttattagaaccgggctgccagctcgaaagcctttgggtgaaaagctgttctttcactgctgcttcatgccagcattttagtatgatgttgacgcgcaacaagtgtcttgttgagctccaattgagcaataataaattaggtgattgtggcgtgcagcagctttgccaagggttatctcaaccaggtgcggccctccaggttttgtggttgggcgactgtgatgtaggtcatagtggctgtctgagcttagcttccgtgttgcttgtcaaccgttccttacgcgaactcgaccttagtaacaactgcatgggcgaagaagggattctccgtttgatggagagcgttgaacaaccgggatgcgtgcttgaacagttggtcctctatgacatctactggtcggaggagatggatcgtcgtttacgtgccttagaagagcgcaaaccgtcattgcgcgtgattttc

SEQ ID NO: 784 - protein, 468 aa, synthetic construct
  REGION 1..468: note = Variant of RNase inhibitor
MHHHHHHGGSGTMSLDIQCQQLSDARWAELLPLLRQSEVVRLDDCGLTESRCKDISSALSANPRLTELSLCTNELGDAGVTLVLQGLQSGTCKIEKLSLQNCCLTKDGCGVLGDMLRRMPTLRALYLNDNPLGDAGLQLLCQGLVDENCHLEKLQVEYCNLTAASCESLASALRFSRHFKELAVSNNELGEAGVRVLCRGLVESPCQLEVLKLENCGLTSASCEDLCLVVASKPSLQELDLGMNKLGDQGIATLCPTLLYPSCQIRVLWLWNCDITTAGCRDLCQVLRAKPSLKELSLAGNALGDEGARLLCESLLEPGCQLESLWVKSCSFTAASCQHFSMMLTRNKCLVELQLSNNKLGDCGVQQLCQGLSQPGAALQVLWLGDCDVGHSGCLSLASVLLVNRSLRELDLSNNCMGEEGILRLMESVEQPGCVLEQLVLYDIYWSEEMDRRLRALEERKPSLRVIF

SEQ ID NO: 785 - DNA, 1404 bp, synthetic construct
  misc_feature 1..1404: note = Variant of RNase inhibitor
  source 1..1404: mol_type = other DNA
atgcaccatcatcatcatcatggcggtagcggcacgatgtctctggatattcagtgtcaacaattgtcagatgcgcgttggactgaactgttaccgcttctgcaacagtcggaagtggtgcgcctggatgactgcggcctcactgagagtcgctgcaaagacatcagttcggcactgagcgccaacccacgtttgaccgaattaagcctgtgtacaaatgagctgggtgatgctggagttaccttagtcctgcagggcttgcagtctggcacgtgcaagattgaaaaactgtccctccagaactgttgtctgacgaaggatggttgcggtgtattaggcgacatgcttcgtagtatgcccaccctgcgcgcactgtatctgaatgataacccgttgggcgatgcgggcctccagctgctttgccaggggctggtggacgaaaattgtcacctggagaaactgcaggtggaatactgcaatctcacagcagcctcgtgcgaaagcttggcgagcgctctgcgtgcatcgcgtcattttaaagaattagcggtttcgaacaacgaactgggtgaagcaggcgtgcgcgtactttgtcgtgggctggtggagagtccatgccaactggaggttctgaaactggaaaattgtggattgacctctgcctcctgcgaggatctttgtctggtggtcgctagcaaaccaagcctccaggaattggaccttggcatgaacaaattaggtgaccaaggcatcgcaacgttatgcccgaccctgcttcacccttcatgccagattcgtgttttgtggctctggaactgtgatatcaccaccgccggctgccgcgacctctgtcaggtattacgcgcgaagccgtccctcaaagagctgagtcttgcgggtaatgccttgggagatgaaggcgcacgtctcttgtgcgaatcgttattagaaccgggctgccagctcgaaagcctttgggtgaaaagctgttctttcactgctgcttcatgccagcattttagtatgatgttgacgcgcaacaagtgtcttgttgagctccaattgagcaataataaattaggtgattgtggcgtgcagctgctttgccaagggttatctcaaccaggtgcggccctccaggttttgtggttgggcgactgtgatgtaggtcatagtggctgtctgagcttagcttccgtgttgcttgtcaaccgttccttacgcgaactcgaccttagtaacaactgcatgggcgaagaagggattctccgtttgatggagagcgttgaacaaccgggatgcgtgcttgaacagttggtcctctatgacatctactggtcggaggagatggatcgtcgtttacgtgccttagaagagcgcaaaccgtcattgcgcgtgattttc

SEQ ID NO: 786 - protein, 468 aa, synthetic construct
  REGION 1..468: note = Variant of RNase inhibitor
MHHHHHHGGSGTMSLDIQCQQLSDARWTELLPLLQQSEVVRLDDCGLTESRCKDISSALSANPRLTELSLCTNELGDAGVTLVLQGLQSGTCKIEKLSLQNCCLTKDGCGVLGDMLRSMPTLRALYLNDNPLGDAGLQLLCQGLVDENCHLEKLQVEYCNLTAASCESLASALRASRHFKELAVSNNELGEAGVRVLCRGLVESPCQLEVLKLENCGLTSASCEDLCLVVASKPSLQELDLGMNKLGDQGIATLCPTLLHPSCQIRVLWLWNCDITTAGCRDLCQVLRAKPSLKELSLAGNALGDEGARLLCESLLEPGCQLESLWVKSCSFTAASCQHFSMMLTRNKCLVELQLSNNKLGDCGVQLLCQGLSQPGAALQVLWLGDCDVGHSGCLSLASVLLVNRSLRELDLSNNCMGEEGILRLMESVEQPGCVLEQLVLYDIYWSEEMDRRLRALEERKPSLRVIF

SEQ ID NO: 787 - DNA, 1404 bp, synthetic construct
  misc_feature 1..1404: note = Variant of RNase inhibitor
  source 1..1404: mol_type = other DNA
atgcaccatcatcatcatcatggcggtagcggcacgatgtctctggatattcagtgtcaacaattgtcagatgcgcgttgggctgaactgttaccgcttctgcaacagtcggaagtggtgcgcctggatgactgcggcctcactgagagtcgctgcaaagacatcagttcggcactgagcgccaacccacgtttgaccgaattaagcctgtgtacaaatgagctgggtgatgctggagttaccttagtcctgcagggcttgcagtctggcacgtgcaagattgaaaaactgtccctccagaactgttgtctgacgaaggatggttgcggtgtattaggcgacatgcttcgtcgtatgcccaccctgcgcgcactgtatctgaatgataacccgttgggcgatgcgggcctccagctgctttgccaggggctggtggacgaaaattgtcacctggagaaactgcaggtggaatactgcaatctcacagcagcctcgtgcgaaagtttggcgagcgctctgcgtgcctcgcgccattttaaagaattagcggtttcgaacaacgaactgggtgaagcaggcgtgcgcgtactttgtcgtgggctggtggagagtccatgccaactggaggttctgaaactggaaaattgtggattgacctctgcctcctgcgaggatctttgtctggtggtcgctagcaaaccaagcctccaggaattggaccttggcatgaacaaattaggtgaccaaggcatcgcaacgttatgcccgaccctgcttcacccttcatgccagattcgtgttttgtggctctggaactgtgatatcaccaccgccggctgccgcgacctctgtcaggtattacgcgcgaagccgtccctcaaagagctgagtcttgcgggtaatgccttgggagatgaaggcgcacgtctcttgtgcgaatcgttattagaaccgggctgccagctcgaaagcctttgggtgaaaagctgttctttcactgctgcttcatgccagcattttagtatgatgttgacgcgcaacaagtgtcttgttgagctccaattgagcaataataaattaggtgattgtggcgtgcagcagctttgccaagggttatctcaaccaggtgcggccctccaggttttgtggttgggcgactgtgatgtaggtcatagtggctgtctgagcttagcttccgtgttgcttgtcaaccgttccttacgcgaactcgaccttagtaacaactgcatgggcgaagaagggattctccgtttgatggagagcgttgaacaaccgggatgcgtgcttgaacagttggtcctctatgacatctactggtcggaggagatggatcgtcgtttacgtgccttagaagagcgcaaaccgtcattgcgcgtgattttc

SEQ ID NO: 788 - protein, 468 aa, synthetic construct
  REGION 1..468: note = Variant of RNase inhibitor
MHHHHHHGGSGTMSLDIQCQQLSDARWAELLPLLQQSEVVRLDDCGLTESRCKDISSALSANPRLTELSLCTNELGDAGVTLVLQGLQSGTCKIEKLSLQNCCLTKDGCGVLGDMLRRMPTLRALYLNDNPLGDAGLQLLCQGLVDENCHLEKLQVEYCNLTAASCESLASALRASRHFKELAVSNNELGEAGVRVLCRGLVESPCQLEVLKLENCGLTSASCEDLCLVVASKPSLQELDLGMNKLGDQGIATLCPTLLHPSCQIRVLWLWNCDITTAGCRDLCQVLRAKPSLKELSLAGNALGDEGARLLCESLLEPGCQLESLWVKSCSFTAASCQHFSMMLTRNKCLVELQLSNNKLGDCGVQQLCQGLSQPGAALQVLWLGDCDVGHSGCLSLASVLLVNRSLRELDLSNNCMGEEGILRLMESVEQPGCVLEQLVLYDIYWSEEMDRRLRALEERKPSLRVIF

SEQ ID NO: 789 - DNA, 1404 bp, synthetic construct
  misc_feature 1..1404: note = Variant of RNase inhibitor
  source 1..1404: mol_type = other DNA
atgcaccatcatcatcatcatggcggtagcggcacgatgtctctggatattcagtgtcaacaattgtcagatgcgcgttggactgaactgttaccgcttctgcaacagtcggaagtggtgcgcctggatgactgcggcctcactgagagtcgctgcaaagacatcagtgtcgcactgcaggccaacccacgtttgaccgaattaagcctgtgtacaaatgagctgggtgatgctggagttaccttagtcctgcagggcttgcagtctggcacgtgcaagattgaaaaactgtccctccagaactgttgtctgacgaaggatggttgcggtgtattaggcgacatgcttcgtcgtatgcccaccctgcgcgcactgtatctgaatgataacccgttgggcgatgcgggcctccagctgctttgccaggggctggtggacgaaaattgtcacctggagaaactgcaggtggaatactgcaatctcacagcagcctcgtgcgaaagtttggcgagcgctctgcgtgcctcgcgccattttaaagaattagcggtttcgaacaacgaactgggtgaagcaggcgtgcgcgtactttgtcgtgggctggtggagagtccatgccaactggaggttctgaaactggaaaattgtggattgacctctgcctcctgcgaggatctttgtctggtggtcgctagcaaaccaagcctccaggaattggaccttggcatgaacaaattaggtgaccaaggcatcgcaacgttatgcccgaccctgcttcacccttcatgccagattcgtgttttgtggctctggaactgtgatatcaccaccgccggctgccgcgacctctgtcaggtattacgcgcgaagccgtccctcaaagagctgagtcttgcgggtaatgccttgggagatgaaggcgcacgtctcttgtgcgaatcgttattagaaccgggctgccagctcgaaagcctttgggtgaaaagctgttctttcactgctgcttcatgccagcattttagtatgatgttgacgcgcaacaagtgtcttgttgagctccaattgagcaataataaattaggtgattgtggcgtgcagcagctttgccaagggttatctcaaccaggtgcggccctccaggttttgtggttgggcgactgtgatgtaggtcatagtggctgtctgagcttagcttccgtgttgcttgtcaaccgttccttacgcgaactcgaccttagtaacaactgcatgggcgaagaagggattctccgtttgatggagagcgttgaacaaccgggatgcgtgcttgaacagttggtcctctatgacatctactggtcggaggagatggatcgtcgtttacgtgccttagaagagcgcaaaccgtcattgcgcgtgattttc

SEQ ID NO: 790 - protein, 468 aa, synthetic construct
  REGION 1..468: note = Variant of RNase inhibitor
MHHHHHHGGSGTMSLDIQCQQLSDARWTELLPLLQQSEVVRLDDCGLTESRCKDISVALQANPRLTELSLCTNELGDAGVTLVLQGLQSGTCKIEKLSLQNCCLTKDGCGVLGDMLRRMPTLRALYLNDNPLGDAGLQLLCQGLVDENCHLEKLQVEYCNLTAASCESLASALRASRHFKELAVSNNELGEAGVRVLCRGLVESPCQLEVLKLENCGLTSASCEDLCLVVASKPSLQELDLGMNKLGDQGIATLCPTLLHPSCQIRVLWLWNCDITTAGCRDLCQVLRAKPSLKELSLAGNALGDEGARLLCESLLEPGCQLESLWVKSCSFTAASCQHFSMMLTRNKCLVELQLSNNKLGDCGVQQLCQGLSQPGAALQVLWLGDCDVGHSGCLSLASVLLVNRSLRELDLSNNCMGEEGILRLMESVEQPGCVLEQLVLYDIYWSEEMDRRLRALEERKPSLRVIF

SEQ ID NO: 791 - DNA, 1404 bp, synthetic construct
  misc_feature 1..1404: note = Variant of RNase inhibitor
  source 1..1404: mol_type = other DNA
atgcaccatcatcatcatcatggcggtagcggcacgatgtctctggatattcagtgtcaacaattgtcagatgcgcgttggactgaactgttaccgcttctgcaacagtcggaggtggtgcgcctggatgactgcggcctcactgagagtcgctgcaaagacatcagtagtgcactgcaagccaacccacgtttgaccgaattaagcctgtgtacaaatgagctgggtgatgctggagttaccttagtcctgcagggcttgcagtctggcacgtgcaagattgaaaaactgtccctccagaactgttgtctgacgaaggatggttgcggtgtattaggcgacatgcttcgtcgtatgcccaccctgcgcgcactgtatctgaatgataacccgttgggcgatgcgggcctccagctgctttgccaggggctggtggacgaaaattgtcacctggagaaactgcaggtggaatactgcaatctcacagcagcctcgtgcgaaagtttggcgagcgctctgcgtgcctcgcgccattttaaagaattagcggtttcgaacaacgaactgggtgaagcaggcgtgcgcgtactttgtcgtgggctggtggagagtccatgccaactggaggttctgaaactggaaaattgtggattgacctctgcctcctgcgaggatctttgtctggtggtcgctagcaaaccaagcctccaggaattggaccttggcatgaacaaattaggtgaccaaggcatcgcaacgttatgcccgaccctgcttctgccttcatgccagattcgtgttttgtggctctggaactgtgatatcaccaccgccggctgccgcgacctctgtcaggtattacgcgcgaagccgtccctcaaagagctgagtcttgcgggtaatgccttgggagatgaaggcgcacgtctcttgtgcgaatcgttattagaaccgggctgccagctcgaaagcctttgggtgaaaagctgttctttcactgctgcttcatgcgtgcattttagtatgatgttgacgcgcaacaagtgtcttgttgagctccaattgagcaataataaattaggtgattgtggcgtgcagcagctttgccaagggttatctcaaccaggtgcggccctccaggttttgtggttgggcgactgtgatgtaggtcatagtggctgtctggcgttagcttccgtgttgcttgtcaaccgttccttacgcgaactcgaccttagtaacaactgcatgggcgaagaagggattctccgtttgatggagagcgttgaacaaccgggatgcgtgcttgaacagttggtcctctatgacatctactggtcggaggagatggatcgtcgtttacgtgccttagaagagcgcaaaccgtcattgcgcgtgattttc

SEQ ID NO: 792 - protein, 468 aa, synthetic construct
  REGION 1..468: note = Variant of RNase inhibitor
MHHHHHHGGSGTMSLDIQCQQLSDARWTELLPLLQQSEVVRLDDCGLTESRCKDISSALQANPRLTELSLCTNELGDAGVTLVLQGLQSGTCKIEKLSLQNCCLTKDGCGVLGDMLRRMPTLRALYLNDNPLGDAGLQLLCQGLVDENCHLEKLQVEYCNLTAASCESLASALRASRHFKELAVSNNELGEAGVRVLCRGLVESPCQLEVLKLENCGLTSASCEDLCLVVASKPSLQELDLGMNKLGDQGIATLCPTLLLPSCQIRVLWLWNCDITTAGCRDLCQVLRAKPSLKELSLAGNALGDEGARLLCESLLEPGCQLESLWVKSCSFTAASCVHFSMMLTRNKCLVELQLSNNKLGDCGVQQLCQGLSQPGAALQVLWLGDCDVGHSGCLALASVLLVNRSLRELDLSNNCMGEEGILRLMESVEQPGCVLEQLVLYDIYWSEEMDRRLRALEERKPSLRVIF

SEQ ID NO: 793 - DNA, 1404 bp, synthetic construct
  misc_feature 1..1404: note = Variant of RNase inhibitor
  source 1..1404: mol_type = other DNA
atgcaccatcatcatcatcatggcggtagcggcacgatgtctctggatattcagtgtcaacaattgtcagatgcgcgttgggctgaactgttaccgcttctgcaacagtcggcggtggtgcgcctggatgactgcggcctcactgagagtcgctgcaaagacatcagtgtcgcactgaaggccaacccacgtttgaccgaattaagcctgtgtacaaatgagctgggtgatgctggagttaccttagtcctgcagggcttgcagtctggcacgtgcaagattgaaaaactgtccctccagaactgttgtctgacgaaggatggttgcggtgtattaggcgacatgcttcgtcgtatgcccaccctgcgcgcactgtatctgaatgataacccgttgggcgatgcgggcctccagctgctttgccaggggctggtggacgaaaattgtcacctggagaaactgcaggtggaatactgcaatctcacagcagcctcgtgcgaaagcttggcgagcgctctgcgtgcatcggttcattttaaagaattagcggtttcgaacaacgaactgggtgaagcaggcgtgcgcgtactttgtcgtgggctggtggagagtccatgccaactggaggttctgaaactggaaaattgtggattgacctctgcctcctgcgaggatctttgtctggtggtcgctagcaaaccaagcctccaggaattggaccttggcatgaacaaattaggtgaccaaggcatcgcaacgttatgcccgaccctgctttatccttcatgccagattcgtgttttgtggctctggaactgtgatatcaccaccgccggctgccgcgacctctgtcaggtattacgcgcgaagccgtccctcaaagagctgagtcttgcgggtaatgccttgggagatgaaggcgcacgtctcttgtgcgaatcgttattagaaccgggctgccagctcgaaagcctttgggtgaaaagctgttctttcactgctgcttcatgcgtgcattttagtatgatgttgacgcgcaacaagtgtcttgttgagctccaattgagcaataataaattaggtgatatgggcgtgcagctgctttgccaagggttatctcaaccaggtgcggccctccaggttttgtggttgggcgactgtgatgtaggtcatagtggctgtctggcgttagcttccgtgttgcttgtcaaccgttccttacgcgaactcgaccttagtaacaactgcatgggcgaagaagggattctccgtttgatggagagcgttgaacaaccgggatgcgtgcttgaacagttggtcctctatgacatctactggtcggaggagatggatcgtcgtttacgtgccttagaagagcgcaaaccgtcattgcgcgtgattttc

SEQ ID NO: 794 - protein, 468 aa, synthetic construct
  REGION 1..468: note = Variant of RNase inhibitor
MHHHHHHGGSGTMSLDIQCQQLSDARWAELLPLLQQSAVVRLDDCGLTESRCKDISVALKANPRLTELSLCTNELGDAGVTLVLQGLQSGTCKIEKLSLQNCCLTKDGCGVLGDMLRRMPTLRALYLNDNPLGDAGLQLLCQGLVDENCHLEKLQVEYCNLTAASCESLASALRASVHFKELAVSNNELGEAGVRVLCRGLVESPCQLEVLKLENCGLTSASCEDLCLVVASKPSLQELDLGMNKLGDQGIATLCPTLLYPSCQIRVLWLWNCDITTAGCRDLCQVLRAKPSLKELSLAGNALGDEGARLLCESLLEPGCQLESLWVKSCSFTAASCVHFSMMLTRNKCLVELQLSNNKLGDMGVQLLCQGLSQPGAALQVLWLGDCDVGHSGCLALASVLLVNRSLRELDLSNNCMGEEGILRLMESVEQPGCVLEQLVLYDIYWSEEMDRRLRALEERKPSLRVIF

SEQ ID NO: 795 - DNA, 1404 bp, synthetic construct
  misc_feature 1..1404: note = Variant of RNase inhibitor
  source 1..1404: mol_type = other DNA
atgcaccatcatcatcatcatggcggtagcggcacgatgtctctggatattcagtgtcaacaattgtcagatgcgcgttgggctgaactgttaccgcttctgcaacagtcggcggtggtgcgcctggatgactgcggcctcactgagagtcgctgcaaagacatcagttcggcactgagcgccaacccacgtttgaccgaattaagcctgtgtacaaatgagctgggtgatgctggagttaccttagtcctgcagggcttgcagtctggcacgtgcaagattgaaaaactgtccctccagaactgttgtctgacgaaggatggttgcggtgtattaggcgacatgcttcgtagtatgcccaccctgcgcgcactgtatctgaatgataacccgttgggcgatgcgggcctccagctgctttgccaggggctggtggacgaaaattgtcacctggagaaactgcaggtggaatactgcaatctcacagcagcctcgtgcgaaagcttggcgagcgctctgcgtgcatcgcgtcattttaaagaattagcggtttcgaacaacgaactgggtgaagcaggcgtgcgcgtactttgtcgtgggctggtggagagtccatgccaactggaggttctgaaactggaaaattgtggattgacctctgcctcctgcgaggatctttgtctggtggtcgctagcaaaccaagcctccaggaattggaccttggcatgaacaaattaggtgaccaaggcatcgcaacgttatgcccgaccctgcttctgccttcatgccagattcgtgttttgtggctctggaactgtgatatcaccaccgccggctgccgcgacctctgtcaggtattacgcgcgaagccgtccctcaaagagctgagtcttgcgggtaatgccttgggagatgaaggcgcacgtctcttgtgcgaatcgttattagaaccgggctgccagctcgaaagcctttgggtgaaaagctgttctttcactgctgcttcatgccagcattttagtatgatgttgacgcgcaacaagtgtcttgttgagctccaattgagcaataataaattaggtgatatgggcgtgcagctgctttgccaagggttatctcaaccaggtgcggccctccaggttttgtggttgggcgactgtgatgtaggtcatagtggctgtctgagcttagcttccgtgttgcttgtcaaccgttccttacgcgaactcgaccttagtaacaactgcatgggcgaagaagggattctccgtttgatggagagcgttgaacaaccgggatgcgtgcttgaacagttggtcctctatgacatctactggtcggaggagatggatcgtcgtttacgtgccttagaagagcgcaaaccgtcattgcgcgtgattttc

SEQ ID NO: 796 - protein, 468 aa, synthetic construct
  REGION 1..468: note = Variant of RNase inhibitor
MHHHHHHGGSGTMSLDIQCQQLSDARWAELLPLLQQSAVVRLDDCGLTESRCKDISSALSANPRLTELSLCTNELGDAGVTLVLQGLQSGTCKIEKLSLQNCCLTKDGCGVLGDMLRSMPTLRALYLNDNPLGDAGLQLLCQGLVDENCHLEKLQVEYCNLTAASCESLASALRASRHFKELAVSNNELGEAGVRVLCRGLVESPCQLEVLKLENCGLTSASCEDLCLVVASKPSLQELDLGMNKLGDQGIATLCPTLLLPSCQIRVLWLWNCDITTAGCRDLCQVLRAKPSLKELSLAGNALGDEGARLLCESLLEPGCQLESLWVKSCSFTAASCQHFSMMLTRNKCLVELQLSNNKLGDMGVQLLCQGLSQPGAALQVLWLGDCDVGHSGCLSLASVLLVNRSLRELDLSNNCMGEEGILRLMESVEQPGCVLEQLVLYDIYWSEEMDRRLRALEERKPSLRVIF

SEQ ID NO: 797 - DNA, 1404 bp, synthetic construct
  misc_feature 1..1404: note = Variant of RNase inhibitor
  source 1..1404: mol_type = other DNA
atgcaccatcatcatcatcatggcggtagcggcacgatgtctctggatattcagtgtcaacaattgtcagatgcgcgttgggctgaactgttaccgcttctgcgccagtcggcggtggtgcgcctggatgactgcggcctcactgagagtcgctgcaaagacatcagtgtcgcactgcaggccaacccacgtttgaccgaattaagcctgtgtacaaatgagctgggtgatgctggagttaccttagtcctgcagggcttgcagtctggcacgtgcaagattgaaaaactgtccctccagaactgttgtctgacgaaggatggttgcggtgtattaggcgacatgcttcgtcgtatgcccaccctgcgcgcactgtatctgaatgataacccgttgggcgatgcgggcctccagctgctttgccaggggctggtggacgaaaattgtcacctggagaaactgcaggtggaatactgcaatctcacagcagcctcgtgcgaaagtttggcgagcgctctgcgtgcctcgcgccattttaaagaattagcggtttcgaacaacgaactgggtgaagcaggcgtgcgcgtactttgtcgtgggctggtggagagtccatgccaactggaggttctgaaactggaaaattgtggattgacctctgcctcctgcgaggatctttgtctggtggtcgctagcaaaccaagcctccaggaattggaccttggcatgaacaaattaggtgaccaaggcatcgcaacgttatgcccgaccctgcttctgccttcatgccagattcgtgttttgtggctctggaactgtgatatcaccaccgccggctgccgcgacctctgtcaggtattacgcgcgaagccgtccctcaaagagctgagtcttgcgggtaatgccttgggagatgaaggcgcacgtctcttgtgcgaatcgttattagaaccgggctgccagctcgaaagcctttgggtgaaaagctgttctttcactgctgcttcatgccagcattttagtatgatgttgacgcgcaacaagtgtcttgttgagctccaattgagcaataataaattaggtgatatgggcgtgcagctgctttgccaagggttatctcaaccaggtgcggccctccaggttttgtggttgggcgactgtgatgtaggtcatagtggctgtctgagcttagcttccgtgttgcttgtcaaccgttccttacgcgaactcgaccttagtaacaactgcatgggcgaagaagggattctccgtttgatggagagcgttgaacaaccgggatgcgtgcttgaacagttggtcctctatgacatctactggtcggaggagatggatcgtcgtttacgtgccttagaagagcgcaaaccgtcattgcgcgtgattttc

SEQ ID NO: 798 - protein, 468 aa, synthetic construct
  REGION 1..468: note = Variant of RNase inhibitor
MHHHHHHGGSGTMSLDIQCQQLSDARWAELLPLLRQSAVVRLDDCGLTESRCKDISVALQANPRLTELSLCTNELGDAGVTLVLQGLQSGTCKIEKLSLQNCCLTKDGCGVLGDMLRRMPTLRALYLNDNPLGDAGLQLLCQGLVDENCHLEKLQVEYCNLTAASCESLASALRASRHFKELAVSNNELGEAGVRVLCRGLVESPCQLEVLKLENCGLTSASCEDLCLVVASKPSLQELDLGMNKLGDQGIATLCPTLLLPSCQIRVLWLWNCDITTAGCRDLCQVLRAKPSLKELSLAGNALGDEGARLLCESLLEPGCQLESLWVKSCSFTAASCQHFSMMLTRNKCLVELQLSNNKLGDMGVQLLCQGLSQPGAALQVLWLGDCDVGHSGCLSLASVLLVNRSLRELDLSNNCMGEEGILRLMESVEQPGCVLEQLVLYDIYWSEEMDRRLRALEERKPSLRVIF

SEQ ID NO: 799 - DNA, 1404 bp, synthetic construct
  misc_feature 1..1404: note = Variant of RNase inhibitor
  source 1..1404: mol_type = other DNA
atgcaccatcatcatcatcatggcggtagcggcacgatgtctctggatattcagtgtcaacaattgtcagatgcgcgttgggctgaactgttaccgcttctgcaacagtcggaggtggtgcgcctggatgactgcggcctcactgagagtcgctgcaaagacatcagtgtcgcactgagcgccaacccacgtttgaccgaattaagcctgtgtacaaatgagctgggtgatgctggagttaccttagtcctgcagggcttgcagtctggcacgtgcaagattgaaaaactgtccctccagaactgttgtctgacgaaggatggttgcggtgtattaggcgacatgcttcgttcaatgcccaccctgcgcgcactgtatctgaatgataacccgttgggcgatgcgggcctccagctgctttgccaggggctggtggacgaaaattgtcacctggagaaactgcaggtggaatactgcaatctcacagcagcctcgtgcgaatttttggcgagcgctctgcgtgcatcgcgtcattttaaagaattagcggtttcgaacaacgaactgggtgaagcaggcgtgcgcgtactttgtcgtgggctggtggagagtccatgccaactggaggttctgaaactggaaaattgtggattgacctctgcctcctgcgaggatctttgtctggtggtcgctagcaaaccaagcctccaggaattggaccttggcatgaacaaattaggtgaccaaggcatcgcaacgttatgcccgaccctgcttctgccttcatgccagattcgtgttttgtggctctggaactgtgatatcaccaccgccggctgccgcgacctctgtcaggtattacgcgcgaagccgtccctcaaagagctgagtcttgcgggtaatgccttgggagatgaaggcgcacgtctcttgtgcgaatcgttattagaaccgggctgccagctcgaaagcctttgggtgaaaagctgttctttcactgctgcttcatgccagcattttagtatgatgttgacgcgcaacaagtgtcttgttgagctccaattgagcaataataaattaggtgattgtggcgtgcaggcgctttgccaagggttatctcaaccaggtgcggccctccaggttttgtggttgggcgactgtgatgtaggtcatagtggctgtctgagcttagcttccgtgttgcttgtcaaccgttccttacgcgaactcgaccttagtaacaactgcatgggcgaagaagggattctccgtttgatggagagcgttgaacaaccgggatgcgtgcttgaacagttggtcctctatgacatctactggtcggaggagatggatcgtcgtttacgtgccttagaagagcgcaaaccgtcattgcgcgtgattttc

SEQ ID NO: 800 - protein, 468 aa, synthetic construct
  REGION 1..468: note = Variant of RNase inhibitor
MHHHHHHGGSGTMSLDIQCQQLSDARWAELLPLLQQSEVVRLDDCGLTESRCKDISVALSANPRLTELSLCTNELGDAGVTLVLQGLQSGTCKIEKLSLQNCCLTKDGCGVLGDMLRSMPTLRALYLNDNPLGDAGLQLLCQGLVDENCHLEKLQVEYCNLTAASCEFLASALRASRHFKELAVSNNELGEAGVRVLCRGLVESPCQLEVLKLENCGLTSASCEDLCLVVASKPSLQELDLGMNKLGDQGIATLCPTLLLPSCQIRVLWLWNCDITTAGCRDLCQVLRAKPSLKELSLAGNALGDEGARLLCESLLEPGCQLESLWVKSCSFTAASCQHFSMMLTRNKCLVELQLSNNKLGDCGVQALCQGLSQPGAALQVLWLGDCDVGHSGCLSLASVLLVNRSLRELDLSNNCMGEEGILRLMESVEQPGCVLEQLVLYDIYWSEEMDRRLRALEERKPSLRVIF

SEQ ID NO: 801 - DNA, 1404 bp, synthetic construct
  misc_feature 1..1404: note = Variant of RNase inhibitor
  source 1..1404: mol_type = other DNA
atgcaccatcatcatcatcatggcggtagcggcacgatgtctctggatattcagtgtcaacaattgtcagatgcgcgttggactgaactgttaccgcttctgcaacagtcggaggtggtgcgcctggatgactgcggcctcactgagagtcgctgcaaagacatcagtagtgcactgcaagccaacccacgtttgaccgaattaagcctgtgtacaaatgagctgggtgatgctggagttaccttagtcctgcagggcttgcagtctggcacgtgcaagattgaaaaactgtccctccagaactgttgtctgacgaaggatggttgcggtgtattaggcgacatgcttcgtagtatgcccaccctgcgcgcactgtatctgaatgataacccgttgggcgatgcgggcctccagctgctttgccaggggctggtggacgaaaattgtcacctggagaaactgcaggtggaatactgcaatctcacagcagcctcgtgcgaatttttggcgagcgctctgcgtttctcgcgtcattttaaagaattagcggtttcgaacaacgaactgggtgaagcaggcgtgcgcgtactttgtcgtgggctggtggagagtccatgccaactggaggttctgaaactggaaaattgtggattgacctctgcctcctgcgaggatctttgtctggtggtcgctagcaaaccaagcctccaggaattggaccttggcatgaacaaattaggtgaccaaggcatcgcaacgttatgcccgaccctgcttctgccttcatgccagattcgtgttttgtggctctggaactgtgatatcaccaccgccggctgccgcgacctctgtcaggtattacgcgcgaagccgtccctcaaagagctgagtcttgcgggtaatgccttgggagatgaaggcgcacgtctcttgtgcgaatcgttattagaaccgggctgccagctcgaaagcctttgggtgaaaagctgttctttcactgctgcttcatgcgtgcattttagtatgatgttgacgcgcaacaagtgtcttgttgagctccaattgagcaataataaattaggtgattgtggcgtgcagctgctttgccaagggttatctcaaccaggtgcggccctccaggttttgtggttgggcgactgtgatgtaggtcatagtggctgtctgagcttagcttccgtgttgcttgtcaaccgttccttacgcgaactcgaccttagtaacaactgcatgggcgaagaagggattctccgtttgatggagagcgttgaacaaccgggatgcgtgcttgaacagttggtcctctatgacatctactggtcggaggagatggatcgtcgtttacgtgccttagaagagcgcaaaccgtcattgcgcgtgattttc

SEQ ID NO: 802 - protein, 468 aa, synthetic construct
  REGION 1..468: note = Variant of RNase inhibitor
MHHHHHHGGSGTMSLDIQCQQLSDARWTELLPLLQQSEVVRLDDCGLTESRCKDISSALQANPRLTELSLCTNELGDAGVTLVLQGLQSGTCKIEKLSLQNCCLTKDGCGVLGDMLRSMPTLRALYLNDNPLGDAGLQLLCQGLVDENCHLEKLQVEYCNLTAASCEFLASALRFSRHFKELAVSNNELGEAGVRVLCRGLVESPCQLEVLKLENCGLTSASCEDLCLVVASKPSLQELDLGMNKLGDQGIATLCPTLLLPSCQIRVLWLWNCDITTAGCRDLCQVLRAKPSLKELSLAGNALGDEGARLLCESLLEPGCQLESLWVKSCSFTAASCVHFSMMLTRNKCLVELQLSNNKLGDCGVQLLCQGLSQPGAALQVLWLGDCDVGHSGCLSLASVLLVNRSLRELDLSNNCMGEEGILRLMESVEQPGCVLEQLVLYDIYWSEEMDRRLRALEERKPSLRVIF

SEQ ID NO: 803 - DNA, 1404 bp, synthetic construct
  misc_feature 1..1404: note = Variant of RNase inhibitor
  source 1..1404: mol_type = other DNA
atgcaccatcatcatcatcatggcggtagcggcacgatgtctctggatattcagtgtcaacaattgtcagatgcgcgttggactgaactgttaccgcttctgcaacagtcggaggtggtgcgcctggatgactgcggcctcactgagagtcgctgcaaagacatcagtgtcgcactgagcgccaacccacgtttgaccgaattaagcctgtgtacaaatgagctgggtgatgctggagttaccttagtcctgcagggcttgcagtctggcacgtgcaagattgaaaaactgtccctccagaactgttgtctgacgaaggatggttgcggtgtattaggcgacatgcttcgttcaatgcccaccctgcgcgcactgtatctgaatgataacccgttgggcgatgcgggcctccagctgctttgccaggggctggtggacgaaaattgtcacctggagaaactgcaggtggaatactgcaatctcacagcagcctcgtgcgaatttttggcgagcgctctgcgtgcctcgcgccattttaaagaattagcggtttcgaacaacgaactgggtgaagcaggcgtgcgcgtactttgtcgtgggctggtggagagtccatgccaactggaggttctgaaactggaaaattgtggattgacctctgcctcctgcgaggatctttgtctggtggtcgctagcaaaccaagcctccaggaattggaccttggcatgaacaaattaggtgaccaaggcatcgcaacgttatgcccgaccctgctttatccttcatgccagattcgtgttttgtggctctggaactgtgatatcaccaccgccggctgccgcgacctctgtcaggtattacgcgcgaagccgtccctcaaagagctgagtcttgcgggtaatgccttgggagatgaaggcgcacgtctcttgtgcgaatcgttattagaaccgggctgccagctcgaaagcctttgggtgaaaagctgttctttcactgctgcttcatgcgtgcattttagtatgatgttgacgcgcaacaagtgtcttgttgagctccaattgagcaataataaattaggtgatatgggcgtgcaggtgctttgccaagggttatctcaaccaggtgcggccctccaggttttgtggttgggcgactgtgatgtaggtcatagtggctgtctggcgttagcttccgtgttgcttgtcaaccgttccttacgcgaactcgaccttagtaacaactgcatgggcgaagaagggattctccgtttgatggagagcgttgaacaaccgggatgcgtgcttgaacagttggtcctctatgacatctactggtcggaggagatggatcgtcgtttacgtgccttagaagagcgcaaaccgtcattgcgcgtgattttc

SEQ ID NO: 804 - protein, 468 aa, synthetic construct
  REGION 1..468: note = Variant of RNase inhibitor
MHHHHHHGGSGTMSLDIQCQQLSDARWTELLPLLQQSEVVRLDDCGLTESRCKDISVALSANPRLTELSLCTNELGDAGVTLVLQGLQSGTCKIEKLSLQNCCLTKDGCGVLGDMLRSMPTLRALYLNDNPLGDAGLQLLCQGLVDENCHLEKLQVEYCNLTAASCEFLASALRASRHFKELAVSNNELGEAGVRVLCRGLVESPCQLEVLKLENCGLTSASCEDLCLVVASKPSLQELDLGMNKLGDQGIATLCPTLLYPSCQIRVLWLWNCDITTAGCRDLCQVLRAKPSLKELSLAGNALGDEGARLLCESLLEPGCQLESLWVKSCSFTAASCVHFSMMLTRNKCLVELQLSNNKLGDMGVQVLCQGLSQPGAALQVLWLGDCDVGHSGCLALASVLLVNRSLRELDLSNNCMGEEGILRLMESVEQPGCVLEQLVLYDIYWSEEMDRRLRALEERKPSLRVIF

SEQ ID NO: 805 - DNA, 1404 bp, synthetic construct
  misc_feature 1..1404: note = Variant of RNase inhibitor
  source 1..1404: mol_type = other DNA
atgcaccatcatcatcatcatggcggtagcggcacgatgtctctggatattcagtgtcaacaattgtcagatgcgcgttggactgaactgttaccgcttctgcaacagtcggaggtggtgcgcctggatgactgcggcctcactgagagtcgctgcaaagacatcagttcggcactgagcgccaacccacgtttgaccgaattaagcctgtgtacaaatgagctgggtgatgctggagttaccttagtcctgcagggcttgcagtctggcacgtgcaagattgaaaaactgtccctccagaactgttgtctgacgaaggatggttgcggtgtattaggcgacatgcttcgttcaatgcccaccctgcgcgcactgtatctgaatgataacccgttgggcgatgcgggcctccagctgctttgccaggggctggtggacgaaaattgtcacctggagaaactgcaggtggaatactgcaatctcacagcagcctcgtgcgaatttttggcgagcgctctgcgtgcctcgcgccattttaaagaattagcggtttcgaacaacgaactgggtgaagcaggcgtgcgcgtactttgtcgtgggctggtggagagtccatgccaactggaggttctgaaactggaaaattgtggattgacctctgcctcctgcgaggatctttgtctggtggtcgctagcaaaccaagcctccaggaattggaccttggcatgaacaaattaggtgaccaaggcatcgcaacgttatgcccgaccctgcttcacccttcatgccagattcgtgttttgtggctctggaactgtgatatcaccaccgccggctgccgcgacctctgtcaggtattacgcgcgaagccgtccctcaaagagctgagtcttgcgggtaatgccttgggagatgaaggcgcacgtctcttgtgcgaatcgttattagaaccgggctgccagctcgaaagcctttgggtgaaaagctgttctttcactgctgcttcatgccagcattttagtatgatgttgacgcgcaacaagtgtcttgttgagctccaattgagcaataataaattaggtgatatgggcgtgcagctgctttgccaagggttatctcaaccaggtgcggccctccaggttttgtggttgggcgactgtgatgtaggtcatagtggctgtctggcgttagcttccgtgttgcttgtcaaccgttccttacgcgaactcgaccttagtaacaactgcatgggcgaagaagggattctccgtttgatggagagcgttgaacaaccgggatgcgtgcttgaacagttggtcctctatgacatctactggtcggaggagatggatcgtcgtttacgtgccttagaagagcgcaaaccgtcattgcgcgtgattttc

SEQ ID NO: 806 - protein, 468 aa, synthetic construct
  REGION 1..468: note = Variant of RNase inhibitor
MHHHHHHGGSGTMSLDIQCQQLSDARWTELLPLLQQSEVVRLDDCGLTESRCKDISSALSANPRLTELSLCTNELGDAGVTLVLQGLQSGTCKIEKLSLQNCCLTKDGCGVLGDMLRSMPTLRALYLNDNPLGDAGLQLLCQGLVDENCHLEKLQVEYCNLTAASCEFLASALRASRHFKELAVSNNELGEAGVRVLCRGLVESPCQLEVLKLENCGLTSASCEDLCLVVASKPSLQELDLGMNKLGDQGIATLCPTLLHPSCQIRVLWLWNCDITTAGCRDLCQVLRAKPSLKELSLAGNALGDEGARLLCESLLEPGCQLESLWVKSCSFTAASCQHFSMMLTRNKCLVELQLSNNKLGDMGVQLLCQGLSQPGAALQVLWLGDCDVGHSGCLALASVLLVNRSLRELDLSNNCMGEEGILRLMESVEQPGCVLEQLVLYDIYWSEEMDRRLRALEERKPSLRVIF

SEQ ID NO: 807 - DNA, 1404 bp, synthetic construct
  misc_feature 1..1404: note = Variant of RNase inhibitor
  source 1..1404: mol_type = other DNA
atgcaccatcatcatcatcatggcggtagcggcacgatgtctctggatattcagtgtcaacaattgtcagatgcgcgttgggctgaactgttaccgcttctgcaacagtcggcggtggtgcgcctggatgactgcggcctcactgagagtcgctgcaaagacatcagtgtcgcactgaaggccaacccacgtttgaccgaattaagcctgtgtacaaatgagctgggtgatgctggagttaccttagtcctgcagggcttgcagtctggcacgtgcaagattgaaaaactgtccctccagaactgttgtctgacgaaggatggttgcggtgtattaggcgacatgcttcgtcgtatgcccaccctgcgcgcactgtatctgaatgataacccgttgggcgatgcgggcctccagctgctttgccaggggctggtggacgaaaattgtcacctggagaaactgcaggtggaatactgcaatctcacagcagcctcgtgcgaatttttggcgagcgctctgcgtgcctcgcgccattttaaagaattagcggtttcgaacaacgaactgggtgaagcaggcgtgcgcgtactttgtcgtgggctggtggagagtccatgccaactggaggttctgaaactggaaaattgtggattgacctctgcctcctgcgaggatctttgtctggtggtcgctagcaaaccaagcctccaggaattggaccttggcatgaacaaattaggtgaccaaggcatcgcaacgttatgcccgaccctgcttctgccttcatgccagattcgtgttttgtggctctggaactgtgatatcaccaccgccggctgccgcgacctctgtcaggtattacgcgcgaagccgtccctcaaagagctgagtcttgcgggtaatgccttgggagatgaaggcgcacgtctcttgtgcgaatcgttattagaaccgggctgccagctcgaaagcctttgggtgaaaagctgttctttcactgctgcttcatgccagcattttagtatgatgttgacgcgcaacaagtgtcttgttgagctccaattgagcaataataaattaggtgattgtggcgtgcagctgctttgccaagggttatctcaaccaggtgcggccctccaggttttgtggttgggcgactgtgatgtaggtcatagtggctgtctgagcttagcttccgtgttgcttgtcaaccgttccttacgcgaactcgaccttagtaacaactgcatgggcgaagaagggattctccgtttgatggagagcgttgaacaaccgggatgcgtgcttgaacagttggtcctctatgacatctactggtcggaggagatggatcgtcgtttacgtgccttagaagagcgcaaaccgtcattgcgcgtgattttc

SEQ ID NO: 808 - protein, 468 aa, synthetic construct
  REGION 1..468: note = Variant of RNase inhibitor
MHHHHHHGGSGTMSLDIQCQQLSDARWAELLPLLQQSAVVRLDDCGLTESRCKDISVALKANPRLTELSLCTNELGDAGVTLVLQGLQSGTCKIEKLSLQNCCLTKDGCGVLGDMLRRMPTLRALYLNDNPLGDAGLQLLCQGLVDENCHLEKLQVEYCNLTAASCEFLASALRASRHFKELAVSNNELGEAGVRVLCRGLVESPCQLEVLKLENCGLTSASCEDLCLVVASKPSLQELDLGMNKLGDQGIATLCPTLLLPSCQIRVLWLWNCDITTAGCRDLCQVLRAKPSLKELSLAGNALGDEGARLLCESLLEPGCQLESLWVKSCSFTAASCQHFSMMLTRNKCLVELQLSNNKLGDCGVQLLCQGLSQPGAALQVLWLGDCDVGHSGCLSLASVLLVNRSLRELDLSNNCMGEEGILRLMESVEQPGCVLEQLVLYDIYWSEEMDRRLRALEERKPSLRVIF

SEQ ID NO: 809 - DNA, 1404 bp, synthetic construct
  misc_feature 1..1404: note = Variant of RNase inhibitor
  source 1..1404: mol_type = other DNA
atgcaccatcatcatcatcatggcggtagcggcacgatgtctctggatattcagtgtcaacaattgtcagatgcgcgttgggctgaactgttaccgcttctgcaacagtcggaagtggtgcgcctggatgactgcggcctcactgagagtcgctgcaaagacatcagtagtgcactgcaagccaacccacgtttgaccgaattaagcctgtgtacaaatgagctgggtgatgctggagttaccttagtcctgcagggcttgcagtctggcacgtgcaagattgaaaaactgtccctccagaactgttgtctgacgaaggatggttgcggtgtattaggcgacatgcttcgtagtatgcccaccctgcgcgcactgtatctgaatgataacccgttgggcgatgcgggcctccagctgctttgccaggggctggtggacgaaaattgtcacctggagaaactgcaggtggaatactgcaatctcacagcagcctcgtgcgaaagtttggcgagcgctctgcgtttctcgcgtcattttaaagaattagcggtttcgaacaacgaactgggtgaagcaggcgtgcgcgtactttgtcgtgggctggtggagagtccatgccaactggaggttctgaaactggaaaattgtggattgacctctgcctcctgcgaggatctttgtctggtggtcgctagcaaaccaagcctccaggaattggaccttggcatgaacaaattaggtgaccaaggcatcgcaacgttatgcccgaccctgcttctgccttcatgccagattcgtgttttgtggctctggaactgtgatatcaccaccgccggctgccgcgacctctgtcaggtattacgcgcgaagccgtccctcaaagagctgagtcttgcgggtaatgccttgggagatgaaggcgcacgtctcttgtgcgaatcgttattagaaccgggctgccagctcgaaagcctttgggtgaaaagctgttctttcactgctgcttcatgccagcattttagtatgatgttgacgcgcaacaagtgtcttgttgagctccaattgagcaataataaattaggtgattgtggcgtgcagctgctttgccaagggttatctcaaccaggtgcggccctccaggttttgtggttgggcgactgtgatgtaggtcatagtggctgtctgtcgttagcttccgtgttgcttgtcaaccgttccttacgcgaactcgaccttagtaacaactgcatgggcgaagaagggattctccgtttgatggagagcgttgaacaaccgggatgcgtgcttgaacagttggtcctctatgacatctactggtcggaggagatggatcgtcgtttacgtgccttagaagagcgcaaaccgtcattgcgcgtgattttc

SEQ ID NO: 810 - protein, 468 aa, synthetic construct
  REGION 1..468: note = Variant of RNase inhibitor
MHHHHHHGGSGTMSLDIQCQQLSDARWAELLPLLQQSEVVRLDDCGLTESRCKDISSALQANPRLTELSLCTNELGDAGVTLVLQGLQSGTCKIEKLSLQNCCLTKDGCGVLGDMLRSMPTLRALYLNDNPLGDAGLQLLCQGLVDENCHLEKLQVEYCNLTAASCESLASALRFSRHFKELAVSNNELGEAGVRVLCRGLVESPCQLEVLKLENCGLTSASCEDLCLVVASKPSLQELDLGMNKLGDQGIATLCPTLLLPSCQIRVLWLWNCDITTAGCRDLCQVLRAKPSLKELSLAGNALGDEGARLLCESLLEPGCQLESLWVKSCSFTAASCQHFSMMLTRNKCLVELQLSNNKLGDCGVQLLCQGLSQPGAALQVLWLGDCDVGHSGCLSLASVLLVNRSLRELDLSNNCMGEEGILRLMESVEQPGCVLEQLVLYDIYWSEEMDRRLRALEERKPSLRVIF

SEQ ID NO: 811 - DNA, 1404 bp, synthetic construct
  misc_feature 1..1404: note = Variant of RNase inhibitor
  source 1..1404: mol_type = other DNA
atgcaccatcatcatcatcatggcggtagcggcacgatgtctctggatattcagtgtcaacaattgtcagatgcgcgttggactgaactgttaccgcttctgcaacagtcggaggtggtgcgcctggatgactgcggcctcactgagagtcgctgcaaagacatcagttcggcactgagcgccaacccacgtttgaccgaattaagcctgtgtacaaatgagctgggtgatgctggagttaccttagtcctgcagggcttgcagtctggcacgtgcaagattgaaaaactgtccctccagaactgttgtctgacgaaggatggttgcggtgtattaggcgacatgcttcgtagtatgcccaccctgcgcgcactgtatctgaatgataacccgttgggcgatgcgggcctccagctgctttgccaggggctggtggacgaaaattgtcacctggagaaactgcaggtggaatactgcaatctcacagcagcctcgtgcgaaagtttggcgagcgctctgcgtgcctcgcgtcattttaaagaattagcggtttcgaacaacgaactgggtgaagcaggcgtgcgcgtactttgtcgtgggctggtggagagtccatgccaactggaggttctgaaactggaaaattgtggattgacctctgcctcctgcgaggatctttgtctggtggtcgctagcaaaccaagcctccaggaattggaccttggcatgaacaaattaggtgaccaaggcatcgcaacgttatgcccgaccctgcttcacccttcatgccagattcgtgttttgtggctctggaactgtgatatcaccaccgccggctgccgcgacctctgtcaggtattacgcgcgaagccgtccctcaaagagctgagtcttgcgggtaatgccttgggagatgaaggcgcacgtctcttgtgcgaatcgttattagaaccgggctgccagctcgaaagcctttgggtgaaaagctgttctttcactgctgcttcatgccagcattttagtatgatgttgacgcgcaacaagtgtcttgttgagctccaattgagcaataataaattaggtgatatgggcgtgcagctgctttgccaagggttatctcaaccaggtgcggccctccaggttttgtggttgggcgactgtgatgtaggtcatagtggctgtctggcgttagcttccgtgttgcttgtcaaccgttccttacgcgaactcgaccttagtaacaactgcatgggcgaagaagggattctccgtttgatggagagcgttgaacaaccgggatgcgtgcttgaacagttggtcctctatgacatctactggtcggaggagatggatcgtcgtttacgtgccttagaagagcgcaaaccgtcattgcgcgtgattttc

SEQ ID NO: 812 - protein, 468 aa, synthetic construct
  REGION 1..468: note = Variant of RNase inhibitor
MHHHHHHGGSGTMSLDIQCQQLSDARWTELLPLLQQSEVVRLDDCGLTESRCKDISSALSANPRLTELSLCTNELGDAGVTLVLQGLQSGTCKIEKLSLQNCCLTKDGCGVLGDMLRSMPTLRALYLNDNPLGDAGLQLLCQGLVDENCHLEKLQVEYCNLTAASCESLASALRASRHFKELAVSNNELGEAGVRVLCRGLVESPCQLEVLKLENCGLTSASCEDLCLVVASKPSLQELDLGMNKLGDQGIATLCPTLLHPSCQIRVLWLWNCDITTAGCRDLCQVLRAKPSLKELSLAGNALGDEGARLLCESLLEPGCQLESLWVKSCSFTAASCQHFSMMLTRNKCLVELQLSNNKLGDMGVQLLCQGLSQPGAALQVLWLGDCDVGHSGCLALASVLLVNRSLRELDLSNNCMGEEGILRLMESVEQPGCVLEQLVLYDIYWSEEMDRRLRALEERKPSLRVIF

SEQ ID NO: 813 - DNA, 1404 bp, synthetic construct
  misc_feature 1..1404: note = Variant of RNase inhibitor
  source 1..1404: mol_type = other DNA
atgcaccatcatcatcatcatggcggtagcggcacgatgtctctggatattcagtgtcaacaattgtcagatgcgcgttggactgaactgttaccgcttctgcaacagtcggaagtggtgcgcctggatgactgcggcctcactgagagtcgctgcaaagacatcagtagtgcactgcaagccaacccacgtttgaccgaattaagcctgtgtacaaatgagctgggtgatgctggagttaccttagtcctgcagggcttgcagtctggcacgtgcaagattgaaaaactgtccctccagaactgttgtctgacgaaggatggttgcggtgtattaggcgacatgcttcgtagtatgcccaccctgcgcgcactgtatctgaatgataacccgttgggcgatgcgggcctccagctgctttgccaggggctggtggacgaaaattgtcacctggagaaactgcaggtggaatactgcaatctcacagcagcctcgtgcgaaagcttggcgagcgctctgcgtgcctcgcgccattttaaagaattagcggtttcgaacaacgaactgggtgaagcaggcgtgcgcgtactttgtcgtgggctggtggagagtccatgccaactggaggttctgaaactggaaaattgtggattgacctctgcctcctgcgaggatctttgtctggtggtcgctagcaaaccaagcctccaggaattggaccttggcatgaacaaattaggtgaccaaggcatcgcaacgttatgcccgaccctgcttagcccttcatgccagattcgtgttttgtggctctggaactgtgatatcaccaccgccggctgccgcgacctctgtcaggtattacgcgcgaagccgtccctcaaagagctgagtcttgcgggtaatgccttgggagatgaaggcgcacgtctcttgtgcgaatcgttattagaaccgggctgccagctcgaaagcctttgggtgaaaagctgttctttcactgctgcttcatgcgtgcattttagtatgatgttgacgcgcaacaagtgtcttgttgagctccaattgagcaataataaattaggtgattgtggcgtgcagctgctttgccaagggttatctcaaccaggtgcggccctccaggttttgtggttgggcgactgtgatgtaggtcatagtggctgtctgagcttagcttccgtgttgcttgtcaaccgttccttacgcgaactcgaccttagtaacaactgcatgggcgaagaagggattctccgtttgatggagagcgttgaacaaccgggatgcgtgcttgaacagttggtcctctatgacatctactggtcggaggagatggatcgtcgtttacgtgccttagaagagcgcaaaccgtcattgcgcgtgattttc

SEQ ID NO: 814 - protein, 468 aa, synthetic construct
  REGION 1..468: note = Variant of RNase inhibitor
MHHHHHHGGSGTMSLDIQCQQLSDARWTELLPLLQQSEVVRLDDCGLTESRCKDISSALQANPRLTELSLCTNELGDAGVTLVLQGLQSGTCKIEKLSLQNCCLTKDGCGVLGDMLRSMPTLRALYLNDNPLGDAGLQLLCQGLVDENCHLEKLQVEYCNLTAASCESLASALRASRHFKELAVSNNELGEAGVRVLCRGLVESPCQLEVLKLENCGLTSASCEDLCLVVASKPSLQELDLGMNKLGDQGIATLCPTLLSPSCQIRVLWLWNCDITTAGCRDLCQVLRAKPSLKELSLAGNALGDEGARLLCESLLEPGCQLESLWVKSCSFTAASCVHFSMMLTRNKCLVELQLSNNKLGDCGVQLLCQGLSQPGAALQVLWLGDCDVGHSGCLSLASVLLVNRSLRELDLSNNCMGEEGILRLMESVEQPGCVLEQLVLYDIYWSEEMDRRLRALEERKPSLRVIF

SEQ ID NO: 815 - DNA, 1404 bp, synthetic construct
  misc_feature 1..1404: note = Variant of RNase inhibitor
  source 1..1404: mol_type = other DNA
atgcaccatcatcatcatcatggcggtagcggcacgatgtctctggatattcagtgtcaacaattgtcagatgcgcgttgggctgaactgttaccgcttctgcaacagtcggaagtggtgcgcctggatgactgcggcctcactgagagtcgctgcaaagacatcagtgtcgcactgcaggccaacccacgtttgaccgaattaagcctgtgtacaaatgagctgggtgatgctggagttaccttagtcctgcagggcttgcagtctggcacgtgcaagattgaaaaactgtccctccagaactgttgtctgacgaaggatggttgcggtgtattaggcgacatgcttcgttcaatgcccaccctgcgcgcactgtatctgaatgataacccgttgggcgatgcgggcctccagctgctttgccaggggctggtggacgaaaattgtcacctggagaaactgcaggtggaatactgcaatctcacagcagcctcgtgcgaaagcttggcgagcgctctgcgtgcctcgcgccattttaaagaattagcggtttcgaacaacgaactgggtgaagcaggcgtgcgcgtactttgtcgtgggctggtggagagtccatgccaactggaggttctgaaactggaaaattgtggattgacctctgcctcctgcgaggatctttgtctggtggtcgctagcaaaccaagcctccaggaattggaccttggcatgaacaaattaggtgaccaaggcatcgcaacgttatgcccgaccctgctttatccttcatgccagattcgtgttttgtggctctggaactgtgatatcaccaccgccggctgccgcgacctctgtcaggtattacgcgcgaagccgtccctcaaagagctgagtcttgcgggtaatgccttgggagatgaaggcgcacgtctcttgtgcgaatcgttattagaaccgggctgccagctcgaaagcctttgggtgaaaagctgttctttcactgctgcttcatgcgtgcattttagtatgatgttgacgcgcaacaagtgtcttgttgagctccaattgagcaataataaattaggtgatatgggcgtgcagctgctttgccaagggttatctcaaccaggtgcggccctccaggttttgtggttgggcgactgtgatgtaggtcatagtggctgtctgagcttagcttccgtgttgcttgtcaaccgttccttacgcgaactcgaccttagtaacaactgcatgggcgaagaagggattctccgtttgatggagagcgttgaacaaccgggatgcgtgcttgaacagttggtcctctatgacatctactggtcggaggagatggatcgtcgtttacgtgccttagaagagcgcaaaccgtcattgcgcgtgattttc

SEQ ID NO: 816 - protein, 468 aa, synthetic construct
  REGION 1..468: note = Variant of RNase inhibitor
MHHHHHHGGSGTMSLDIQCQQLSDARWAELLPLLQQSEVVRLDDCGLTESRCKDISVALQANPRLTELSLCTNELGDAGVTLVLQGLQSGTCKIEKLSLQNCCLTKDGCGVLGDMLRSMPTLRALYLNDNPLGDAGLQLLCQGLVDENCHLEKLQVEYCNLTAASCESLASALRASRHFKELAVSNNELGEAGVRVLCRGLVESPCQLEVLKLENCGLTSASCEDLCLVVASKPSLQELDLGMNKLGDQGIATLCPTLLYPSCQIRVLWLWNCDITTAGCRDLCQVLRAKPSLKELSLAGNALGDEGARLLCESLLEPGCQLESLWVKSCSFTAASCVHFSMMLTRNKCLVELQLSNNKLGDMGVQLLCQGLSQPGAALQVLWLGDCDVGHSGCLSLASVLLVNRSLRELDLSNNCMGEEGILRLMESVEQPGCVLEQLVLYDIYWSEEMDRRLRALEERKPSLRVIF

SEQ ID NO: 817 - DNA, 1404 bp, synthetic construct
  misc_feature 1..1404: note = Variant of RNase inhibitor
  source 1..1404: mol_type = other DNA
atgcaccatcatcatcatcatggcggtagcggcacgatgtctctggatattcagtgtcaacaattgtcagatgcgcgttggactgaactgttaccgcttctgcaacagtcggaggtggtgcgcctggatgactgcggcctcactgagagtcgctgcaaagacatcagtagtgcactgcaagccaacccacgtttgaccgaattaagcctgtgtacaaatgagctgggtgatgctggagttaccttagtcctgcagggcttgcagtctggcacgtgcaagattgaaaaactgtccctccagaactgttgtctgacgaaggatggttgcggtgtattaggcgacatgcttcgttcaatgcccaccctgcgcgcactgtatctgaatgataacccgttgggcgatgcgggcctccagctgctttgccaggggctggtggacgaaaattgtcacctggagaaactgcaggtggaatactgcaatctcacagcagcctcgtgcgaatttttggcgagcgctctgcgtgcctcgcgccattttaaagaattagcggtttcgaacaacgaactgggtgaagcaggcgtgcgcgtactttgtcgtgggctggtggagagtccatgccaactggaggttctgaaactggaaaattgtggattgacctctgcctcctgcgaggatctttgtctggtggtcgctagcaaaccaagcctccaggaattggaccttggcatgaacaaattaggtgaccaaggcatcgcaacgttatgcccgaccctgcttctgccttcatgccagattcgtgttttgtggctctggaactgtgatatcaccaccgccggctgccgcgacctctgtcaggtattacgcgcgaagccgtccctcaaagagctgagtcttgcgggtaatgccttgggagatgaaggcgcacgtctcttgtgcgaatcgttattagaaccgggctgccagctcgaaagcctttgggtgaaaagctgttctttcactgctgcttcatgccagcattttagtatgatgttgacgcgcaacaagtgtcttgttgagctccaattgagcaataataaattaggtgattgtggcgtgcagctgctttgccaagggttatctcaaccaggtgcggccctccaggttttgtggttgggcgactgtgatgtaggtcatagtggctgtctgtcgttagcttccgtgttgcttgtcaaccgttccttacgcgaactcgaccttagtaacaactgcatgggcgaagaagggattctccgtttgatggagagcgttgaacaaccgggatgcgtgcttgaacagttggtcctctatgacatctactggtcggaggagatggatcgtcgtttacgtgccttagaagagcgcaaaccgtcattgcgcgtgattttc

SEQ ID NO: 818 - protein, 468 aa, synthetic construct
  REGION 1..468: note = Variant of RNase inhibitor
MHHHHHHGGSGTMSLDIQCQQLSDARWTELLPLLQQSEVVRLDDCGLTESRCKDISSALQANPRLTELSLCTNELGDAGVTLVLQGLQSGTCKIEKLSLQNCCLTKDGCGVLGDMLRSMPTLRALYLNDNPLGDAGLQLLCQGLVDENCHLEKLQVEYCNLTAASCEFLASALRASRHFKELAVSNNELGEAGVRVLCRGLVESPCQLEVLKLENCGLTSASCEDLCLVVASKPSLQELDLGMNKLGDQGIATLCPTLLLPSCQIRVLWLWNCDITTAGCRDLCQVLRAKPSLKELSLAGNALGDEGARLLCESLLEPGCQLESLWVKSCSFTAASCQHFSMMLTRNKCLVELQLSNNKLGDCGVQLLCQGLSQPGAALQVLWLGDCDVGHSGCLSLASVLLVNRSLRELDLSNNCMGEEGILRLMESVEQPGCVLEQLVLYDIYWSEEMDRRLRALEERKPSLRVIF

SEQ ID NO: 819 - DNA, 1404 bp, synthetic construct
  misc_feature 1..1404: note = Variant of RNase inhibitor
  source 1..1404: mol_type = other DNA
atgcaccatcatcatcatcatggcggtagcggcacgatgtctctggatattcagtgtcaacaattgtcagatgcgcgttggactgaactgttaccgcttctgcaacagtcggaggtggtgcgcctggatgactgcggcctcactgagagtcgctgcaaagacatcagtagtgcactgcaagccaacccacgtttgaccgaattaagcctgtgtacaaatgagctgggtgatgctggagttaccttagtcctgcagggcttgcagtctggcacgtgcaagattgaaaaactgtccctccagaactgttgtctgacgaaggatggttgcggtgtattaggcgacatgcttcgtagtatgcccaccctgcgcgcactgtatctgaatgataacccgttgggcgatgcgggcctccagctgctttgccaggggctggtggacgaaaattgtcacctggagaaactgcaggtggaatactgcaatctcacagcagcctcgtgcgaaagcttggcgagcgctctgcgtgcctcgcgccattttaaagaattagcggtttcgaacaacgaactgggtgaagcaggcgtgcgcgtactttgtcgtgggctggtggagagtccatgccaactggaggttctgaaactggaaaattgtggattgacctctgcctcctgcgaggatctttgtctggtggtcgctagcaaaccaagcctccaggaattggaccttggcatgaacaaattaggtgaccaaggcatcgcaacgttatgcccgaccctgcttcacccttcatgccagattcgtgttttgtggctctggaactgtgatatcaccaccgccggctgccgcgacctctgtcaggtattacgcgcgaagccgtccctcaaagagctgagtcttgcgggtaatgccttgggagatgaaggcgcacgtctcttgtgcgaatcgttattagaaccgggctgccagctcgaaagcctttgggtgaaaagctgttctttcactgctgcttcatgccagcattttagtatgatgttgacgcgcaacaagtgtcttgttgagctccaattgagcaataataaattaggtgattgtggcgtgcagctgctttgccaagggttatctcaaccaggtgcggccctccaggttttgtggttgggcgactgtgatgtaggtcatagtggctgtctggcgttagcttccgtgttgcttgtcaaccgttccttacgcgaactcgaccttagtaacaactgcatgggcgaagaagggattctccgtttgatggagagcgttgaacaaccgggatgcgtgcttgaacagttggtcctctatgacatctactggtcggaggagatggatcgtcgtttacgtgccttagaagagcgcaaaccgtcattgcgcgtgattttc

SEQ ID NO: 820 - protein, 468 aa, synthetic construct
  REGION 1..468: note = Variant of RNase inhibitor
MHHHHHHGGSGTMSLDIQCQQLSDARWTELLPLLQQSEVVRLDDCGLTESRCKDISSALQANPRLTELSLCTNELGDAGVTLVLQGLQSGTCKIEKLSLQNCCLTKDGCGVLGDMLRSMPTLRALYLNDNPLGDAGLQLLCQGLVDENCHLEKLQVEYCNLTAASCESLASALRASRHFKELAVSNNELGEAGVRVLCRGLVESPCQLEVLKLENCGLTSASCEDLCLVVASKPSLQELDLGMNKLGDQGIATLCPTLLHPSCQIRVLWLWNCDITTAGCRDLCQVLRAKPSLKELSLAGNALGDEGARLLCESLLEPGCQLESLWVKSCSFTAASCQHFSMMLTRNKCLVELQLSNNKLGDCGVQLLCQGLSQPGAALQVLWLGDCDVGHSGCLALASVLLVNRSLRELDLSNNCMGEEGILRLMESVEQPGCVLEQLVLYDIYWSEEMDRRLRALEERKPSLRVIF

SEQ ID NO: 821 - DNA, 1404 bp, synthetic construct
  misc_feature 1..1404: note = Variant of RNase inhibitor
  source 1..1404: mol_type = other DNA
atgcaccatcatcatcatcatggcggtagcggcacgatgtctctggatattcagtgtcaacaattgtcagatgcgcgttgggctgaactgttaccgcttctgcgccagtcggaggtggtgcgcctggatgactgcggcctcactgagagtcgctgcaaagacatcagtagtgcactgcaagccaacccacgtttgaccgaattaagcctgtgtacaaatgagctgggtgatgctggagttaccttagtcctgcagggcttgcagtctggcacgtgcaagattgaaaaactgtccctccagaactgttgtctgacgaaggatggttgcggtgtattaggcgacatgcttcgttcaatgcccaccctgcgcgcactgtatctgaatgataacccgttgggcgatgcgggcctccagctgctttgccaggggctggtggacgaaaattgtcacctggagaaactgcaggtggaatactgcaatctcacagcagcctcgtgcgaaagtttggcgagcgctctgcgtttctcgcgtcattttaaagaattagcggtttcgaacaacgaactgggtgaagcaggcgtgcgcgtactttgtcgtgggctggtggagagtccatgccaactggaggttctgaaactggaaaattgtggattgacctctgcctcctgcgaggatctttgtctggtggtcgctagcaaaccaagcctccaggaattggaccttggcatgaacaaattaggtgaccaaggcatcgcaacgttatgcccgaccctgctttatccttcatgccagattcgtgttttgtggctctggaactgtgatatcaccaccgccggctgccgcgacctctgtcaggtattacgcgcgaagccgtccctcaaagagctgagtcttgcgggtaatgccttgggagatgaaggcgcacgtctcttgtgcgaatcgttattagaaccgggctgccagctcgaaagcctttgggtgaaaagctgttctttcactgctgcttcatgccagcattttagtatgatgttgacgcgcaacaagtgtcttgttgagctccaattgagcaataataaattaggtgattgtggcgtgcagctgctttgccaagggttatctcaaccaggtgcggccctccaggttttgtggttgggcgactgtgatgtaggtcatagtggctgtctggcgttagcttccgtgttgcttgtcaaccgttccttacgcgaactcgaccttagtaacaactgcatgggcgaagaagggattctccgtttgatggagagcgttgaacaaccgggatgcgtgcttgaacagttggtcctctatgacatctactggtcggaggagatggatcgtcgtttacgtgccttagaagagcgcaaaccgtcattgcgcgtgattttc

SEQ ID NO: 822 - protein, 468 aa, synthetic construct
  REGION 1..468: note = Variant of RNase inhibitor
MHHHHHHGGSGTMSLDIQCQQLSDARWAELLPLLRQSEVVRLDDCGLTESRCKDISSALQANPRLTELSLCTNELGDAGVTLVLQGLQSGTCKIEKLSLQNCCLTKDGCGVLGDMLRSMPTLRALYLNDNPLGDAGLQLLCQGLVDENCHLEKLQVEYCNLTAASCESLASALRFSRHFKELAVSNNELGEAGVRVLCRGLVESPCQLEVLKLENCGLTSASCEDLCLVVASKPSLQELDLGMNKLGDQGIATLCPTLLYPSCQIRVLWLWNCDITTAGCRDLCQVLRAKPSLKELSLAGNALGDEGARLLCESLLEPGCQLESLWVKSCSFTAASCQHFSMMLTRNKCLVELQLSNNKLGDCGVQLLCQGLSQPGAALQVLWLGDCDVGHSGCLALASVLLVNRSLRELDLSNNCMGEEGILRLMESVEQPGCVLEQLVLYDIYWSEEMDRRLRALEERKPSLRVIF

SEQ ID NO: 823 - DNA, 1404 bp, synthetic construct
  misc_feature 1..1404: note = Variant of RNase inhibitor
  source 1..1404: mol_type = other DNA
atgcaccatcatcatcatcatggcggtagcggcacgatgtctctggatattcagtgtcaacaattgtcagatgcgcgttggactgaactgttaccgcttctgcaacagtcggaggtggtgcgcctggatgactgcggcctcactgagagtcgctgcaaagacatcagtgtcgcactgaaggccaacccacgtttgaccgaattaagcctgtgtacaaatgagctgggtgatgctggagttaccttagtcctgcagggcttgcagtctggcacgtgcaagattgaaaaactgtccctccagaactgttgtctgacgaaggatggttgcggtgtattaggcgacatgcttcgtagtatgcccaccctgcgcgcactgtatctgaatgataacccgttgggcgatgcgggcctccagctgctttgccaggggctggtggacgaaaattgtcacctggagaaactgcaggtggaatactgcaatctcacagcagcctcgtgcgaatttttggcgagcgctctgcgtgcctcgcgccattttaaagaattagcggtttcgaacaacgaactgggtgaagcaggcgtgcgcgtactttgtcgtgggctggtggagagtccatgccaactggaggttctgaaactggaaaattgtggattgacctctgcctcctgcgaggatctttgtctggtggtcgctagcaaaccaagcctccaggaattggaccttggcatgaacaaattaggtgaccaaggcatcgcaacgttatgcccgaccctgcttctgccttcatgccagattcgtgttttgtggctctggaactgtgatatcaccaccgccggctgccgcgacctctgtcaggtattacgcgcgaagccgtccctcaaagagctgagtcttgcgggtaatgccttgggagatgaaggcgcacgtctcttgtgcgaatcgttattagaaccgggctgccagctcgaaagcctttgggtgaaaagctgttctttcactgctgcttcatgccagcattttagtatgatgttgacgcgcaacaagtgtcttgttgagctccaattgagcaataataaattaggtgattgtggcgtgcagctgctttgccaagggttatctcaaccaggtgcggccctccaggttttgtggttgggcgactgtgatgtaggtcatagtggctgtctgagcttagcttccgtgttgcttgtcaaccgttccttacgcgaactcgaccttagtaacaactgcatgggcgaagaagggattctccgtttgatggagagcgttgaacaaccgggatgcgtgcttgaacagttggtcctctatgacatctactggtcggaggagatggatcgtcgtttacgtgccttagaagagcgcaaaccgtcattgcgcgtgattttc

SEQ ID NO: 824 - protein, 468 aa, synthetic construct
  REGION 1..468: note = Variant of RNase inhibitor
MHHHHHHGGSGTMSLDIQCQQLSDARWTELLPLLQQSEVVRLDDCGLTESRCKDISVALKANPRLTELSLCTNELGDAGVTLVLQGLQSGTCKIEKLSLQNCCLTKDGCGVLGDMLRSMPTLRALYLNDNPLGDAGLQLLCQGLVDENCHLEKLQVEYCNLTAASCEFLASALRASRHFKELAVSNNELGEAGVRVLCRGLVESPCQLEVLKLENCGLTSASCEDLCLVVASKPSLQELDLGMNKLGDQGIATLCPTLLLPSCQIRVLWLWNCDITTAGCRDLCQVLRAKPSLKELSLAGNALGDEGARLLCESLLEPGCQLESLWVKSCSFTAASCQHFSMMLTRNKCLVELQLSNNKLGDCGVQLLCQGLSQPGAALQVLWLGDCDVGHSGCLSLASVLLVNRSLRELDLSNNCMGEEGILRLMESVEQPGCVLEQLVLYDIYWSEEMDRRLRALEERKPSLRVIF

1. An engineered RNase inhibitor, or a functional fragment thereof, comprising an amino acid sequence having at least 70%, 75%, 80%, 81%, 82%, 83%, 84%, 85%, 86%, 87%, 88%, 89%, 90%, 91%, 92%, 93%, 94%, 95%, 96%, 97%, 98%, 99%, or more sequence identity to a reference sequence corresponding to residues 13 to 468 of an even numbered SEQ ID NO. of SEQ ID NOs: 2 and 26-824, or to a reference sequence corresponding to an even numbered SEQ ID NO. of SEQ ID NOs: 2 and 26-824, wherein the amino acid sequence comprises one or more substitutions relative to the reference sequence corresponding to residues 13 to 468 of SEQ ID NO: 2, 36, 238, 320, 360, 442, or 578, or relative to the reference sequence corresponding to SEQ ID NO: 2, 36, 238, 320, 360, 442, or 578.

2. The engineered RNase inhibitor comprising of claim 1, comprising an amino acid sequence having at least 70%, 75%, 80%, 81%, 82%, 83%, 84%, 85%, 86%, 87%, 88%, 89%, 90%, 91%, 92%, 93%, 94%, 95%, 96%, 97%, 98%, 99%, or more sequence identity to a reference sequence corresponding to residues 13 to 468 of SEQ ID NO: 2, 36, 238, 320, 360, 442, or 578, or to a reference sequence corresponding to SEQ ID NO: 2, 36, 238, 320, 360, 442, or 578, wherein the amino acid sequence comprises one or more substitutions relative to the reference sequence corresponding to residues 13 to 468 of SEQ ID NO: 2, 36, 238, 320, 360, 442, or 578, or relative to the reference sequence corresponding to SEQ ID NO: 2, 36, 238, 320, 360, 442, or 578.

3-6. (canceled)

7. The engineered RNase inhibitor of claim 1, wherein the amino acid sequence of the engineered RNase inhibitor comprises at least a substitution at amino acid position 12, 13, 15, 28, 35, 37, 38, 40, 50, 51, 56, 57, 60, 64, 66, 78, 81, 83, 84, 90, 91, 94, 95, 107, 113, 118, 121, 124, 126, 135, 137, 138, 142, 145, 147, 148, 150, 156, 158, 167, 168, 173, 175, 176, 177, 178, 203, 205, 221, 228, 230, 237, 243, 257, 260, 265, 267, 272, 285, 291, 296, 317, 319, 323, 326, 332, 338, 341, 342, 345, 348, 351, 363, 367, 373, 377, 385, 386, 390, 395, 396, 400, 417, 419, 422, 429, 430, 452, 453, 459, or 466, or combinations thereof, wherein the amino acid positions are relative to the reference sequence corresponding to residues 13 to 468 of SEQ ID NO: 2, or relative to the reference sequence corresponding to SEQ ID NO: 2.

8. The engineered RNase inhibitor of claim 1, wherein the amino acid sequence of the engineered RNase inhibitor comprises at least a substitution 12K, 13T, 15R, 28A/H, 35R, 37A/C, 38A/C/R/T, 401, 50Q/S, 51H, 56A, 57M/T/V, 60K/S, 64R/V, 66I, 78K/T, 81F/M/T/V, 83L, 84I/V, 90G, 91K, 94L, 95E/Q, 107A/D/I/V, 113G, 118R, 121S, 124A, 126V, 135V, 137V, 138L, 142H/Q, 145E/G/I/M/S/V, 147E, 148N, 150Q, 156M, 158C, 167K, 168F/I, 173I, 175F, 176S, 177T/V, 178D, 203E, 205I/L/P/V, 221S, 228A/L/K/R/Q, 230L, 237R, 243C/M/R/S, 257F/G/S/T/V, 260L/S/Y, 265L, 267H/K/R/T, 272N/Q, 285K/Q, 291E/S, 296I/L, 317S, 319G/T, 323E, 326L, 332L, 338V, 341C, 342A/H/M, 345A/S, 348K, 351K/R, 363E/M, 367A/L/V, 373A, 377S/T, 385A, 386G, 390G/S/T, 395C/E/I/L/M/V, 396A, 400L, 417L, 419D, 422V, 429L, 430G/L, 452K/R, 453A/F/K/L/M/R/W, 459E/K/M, or 466I, or combinations thereof, wherein the amino acid positions are relative to the reference sequence corresponding to residues 13 to 468 of SEQ ID NO: 2, or relative to the reference sequence corresponding to SEQ ID NO: 2.

9-13. (canceled)

14. The engineered RNase inhibitor of claim 1, wherein the amino acid sequence of the engineered RNase inhibitor comprises at least a substitution or substitution set at amino acid position(s) 257/459, 345, 257, 296, 113, 95/296/459, 95/257/296, 453, 107/267, 417/422/459, 395, 390, 257/296, 243, 156/257, 351, 348, 363, 95/257/296/422, 94/121/332/390/466, 257/417/419/459, 452, 377/390, 272, 126/386, 267, 430, 230/429, 459, 83/107/230/267/429, 107/429, 107/323/429, 94/121/265/390, 400, 429, or 81, wherein the amino acid positions are relative to the reference sequence corresponding to residues 13 to 468 of SEQ ID NO: 2, or relative to the reference sequence corresponding to SEQ ID NO: 2.

15-19. (canceled)

20. The engineered RNase inhibitor of claim 1, comprising an amino acid sequence having at least 70%, 75%, 80%, 81%, 82%, 83%, 84%, 85%, 86%, 87%, 88%, 89%, 90%, 91%, 92%, 93%, 94%, 95%, 96%, 97%, 98%, 99% or more sequence identity to a reference sequence corresponding to residues 13 to 468 of an even numbered SEQ ID NO. of SEQ ID NOs: 26-824, or to a reference sequence corresponding to an even numbered SEQ ID NO. of SEQ ID NOs: 26-824, wherein the amino acid sequence comprises one or more substitutions relative to the reference sequence corresponding to residues 13 to 468 of SEQ ID NO: 36, 238, 320, 360, 442, or 578, or relative to the reference sequence corresponding to SEQ ID NO: 36, 238, 320, 360, 442, or 578.

21. The engineered RNase inhibitor of claim 20, wherein the amino acid sequence of the engineered RNase inhibitor comprises at least a substitution at amino acid position 12, 13, 15, 28, 35, 37, 38, 40, 50, 51, 56, 57, 60, 64, 66, 78, 81, 83, 84, 90, 91, 94, 95, 107, 113, 118, 121, 124, 126, 135, 137, 138, 142, 145, 147, 148, 150, 156, 158, 167, 168, 173, 175, 176, 177, 178, 203, 205, 221, 228, 230, 237, 243, 257, 260, 265, 267, 272, 285, 291, 296, 317, 319, 323, 326, 332, 338, 341, 342, 345, 348, 351, 363, 367, 373, 377, 385, 386, 390, 395, 396, 400, 417, 419, 422, 429, 430, 452, 453, 459, or 466, or combinations thereof, wherein the amino acid positions are relative to the reference sequence corresponding to residues 13 to 468 of SEQ ID NO: 36, 238, 320, 360, 442, or 578, or relative to the reference sequence corresponding to SEQ ID NO: 36, 238, 320, 360, 442, or 578.

22. The engineered RNase inhibitor of claim 21, wherein the amino acid sequence of the engineered RNase inhibitor comprises at least a substitution or an amino acid residue 12K, 13T, 15R, 28A/H, 35R, 37A/C, 38A/C/R/T, 401, 50Q/S/M, 51H, 56A, 57M/T/V, 60K/S, 64R/V, 661, 78K/T, 81F/M/T/V, 83L, 84I/V, 90G, 91K, 94L, 95E/Q, 107A/D/I/V, 113G, 118R, 121S, 124A, 126V, 135V, 137V, 138L, 142H/Q, 145E/G/I/M/S/V, 147E/P, 148Q/N, 150Q, 156M, 158C, 167K, 168F/I, 1731, 175F, 176S, 177T/V, 178D, 203E, 205I/L/P/V, 221S, 228A/L/K/R/Q, 230L, 237R, 243C/M/R/S, 257F/G/S/T/V, 260L/S/Y, 265L, 267H/K/R/T, 272N/Q, 285K/Q, 291E/P/S, 296I/L, 317S, 319G/T, 323E, 326L, 332L, 338V, 341C, 342A/H/M, 345A/S, 348T/K, 351K/R, 363E/M, 367A/L/V, 373A, 377S/T, 385A, 386G, 390G/S/T, 395C/E/I/L/M/V, 396A, 400L, 417L, 419D, 422V, 429L, 430G/L, 452K/R, 453A/F/K/L/M/R/W, 459E/K/M, or 466I, or combinations thereof, wherein the amino acid positions are relative to the reference sequence corresponding to residues 13 to 468 of SEQ ID NO: 36, 238, 320, 360, 442, or 578, or relative to the reference sequence corresponding to SEQ ID NO:
36, 238, 320, 360, 442, or 578.

23-26. (canceled)

27. The engineered RNase inhibitor of claim 20, wherein the amino acid sequence of the engineered RNase inhibitor comprises at least a substitution or substitution set at amino acid positions(s) 323/390/429, 257/323/429, 257/390, 257/323/390, 257/323/390/429, 257/429, 257/377/390, 135/257/323/377/390, 323/377/390/429, 257/323/377/390, 257/377/429, 158/257/323/377/390, 257/323/377/429, 167/257/323/390/429, 377/390/429, 377/390, 257/323/377/390/429, 257/377, 390/429, 257/377/390/429, 257/390/429, 390, 243/363/390, 113/257/351/363/429, 113/257/351/390/430, 113/257/272/390, 113/243/351/390/429, 257/272/345/348, 243/257/351/390, 113/243/257/272/390, 257/272/363/390/430, 257/351/390, 113/243/390/430, 113/257/267/351/363/400/430, 113/243/257/351/430, 243/267/341/390/395, 113/243/257/345/348, 113/243/257/348/390, 243/345/348/390, 113/243/257/345/430, 257/345/348/351/390/429/430, 272/345/390/429/430, 243/267/351, 243/272/345/390, 113/257/363/390, 243/390/429, 113/243/257/351/390, 113/243/272/345/348/430, 243/267/272/348/390, 113/257/272/345/348/363/430, 113/243/390/429/430, 113/243/257/272/351/363, 243/272/345/348/363/390/395, 113/243/272/351/363/390/395, 113/243/257/272/345/390/430, 113/243/267/272/363/390/430, 113/243/267/348/363/430, 113/243/257/351/390/430, 113/243/257/272/351/390, 113/243/267/390/430, 243/257/348/395/430, 243/345/348/429/430, 243/257/345/348/395, 243/257/272/351/400/429, 113/243/267, 113/390/430, 243/267/351/400, or 429/430, wherein the amino acid positions are relative to the reference sequence corresponding to residues 13 to 468 of SEQ ID NO: 36, or relative to the reference sequence corresponding to SEQ ID NO: 36.

28. (canceled)

29. (canceled)

30. The engineered RNase inhibitor of claim 20, wherein the amino acid sequence of the engineered RNase inhibitor comprises at least a substitution or substitution set at amino acid positions(s) 323/453, 323/348/452, 452/453, 323/351/430/452/453, 291, 145, 228, 323/429, 38, 150, 12, 173, 38/237, or 40, wherein the amino acid positions are relative to the reference sequence corresponding to residues 13 to 468 of SEQ ID NO: 238, or relative to the reference sequence corresponding to SEQ ID NO: 238.

31. (canceled)

32. (canceled)

33. The engineered RNase inhibitor of claim 20, wherein the amino acid sequence of the engineered RNase inhibitor comprises at least a substitution or substitution set at amino acid position(s) 13/145/228/291/348/351, 453,12/13/453,145/228/291/453, 13/145/453, 145/291/453, 38/145/453, 12/145/453, 38/145/228/453, 15/28/81/124/221/285/317, 15/28/64/203/221/285/317, 15/57/81/124/148/203, 12/453, 56/57/64/81/91/124/203/285/317, 66/90/142/176/205/319, 228/453, 145/228/45313/145/228/291/348/351, 453, 12/13/453, 145/228/291/453, 13/145/453, 145/291/453, 38/145/453, 12/145/453, 38/145/228/453, 15/28/81/124/221/285/317, 15/28/64/203/221/285/317, 15/57/81/124/148/203, 12/453, 56/57/64/81/91/124/203/285/317, 66/90/142/176/205/319, 228/453, or 145/228/453, wherein the amino acid positions are relative to the reference sequence corresponding to residues 13 to 468 of SEQ ID NO: 320, or relative to the reference sequence corresponding to SEQ ID NO: 320.

34. (canceled)

35. (canceled)

36. The engineered RNase inhibitor of claim 20, wherein the amino acid sequence of the engineered RNase inhibitor comprises at least a substitution or substitution set at amino acid position(s) 319, 37, 60, 342, 81, 50, 395, 64, 177, 107, 373, 205, 35, 78, 228, 178, 285, 37/142/148/203/205/285/319, 50/81/90/124/147/148/203/205/285, 66/90/148/285/317/319, 28/37/91/142/205/285, 50/91/124/142/147/148/203/205/317/319, 50/66/90/91/124/142/285/317, 147/148/203/285/317/319, 50/66/81/90/205/319, 50/66/124/203/205/317/319, 28/66/84/90/91/142/205/319, 37/91/148/205/319, 28/66/81/124/147/285/319, 28/50/66/84/90/147/203/205/317, 28/50/90/91/124/142/319, 37/81/147/148/203/205, 28/66/81/90/91/124/203/285/317/319, 28/50/66/81/90/91/138/147/148/205/285/319, 28/37/50/124/319, 81/90/91/124/285/317, 50/90/142/203/285, 50/90/124/142/205/285/319, 28/66/90/91/147/148/205/319/326, 66/81/319, 28/66/90/203/205/319, 50/66/90/91/205, 50/66/147/205, 37/81/285, 50/66/90/91/319, 50/147/203/285, 37/50/81/148, 28/66/142/319, 15/28/66/81/90/91/147/148/319, 15/28/81/90/91/142/285/317/319, 15/28/37/50/66/124/147/148/205/285, 15/66/81/147/148, 66/91/124/142/147/148, 15/37/66/81/147/148/317/319, 15/50/90/91/124/142/147/285/317/319, 15/50/90/91/142/147/148/203/205, 15/28/81/142/147/148/285/317/319, 15/28/50/66/90/91/203/285/319, 15/66/90/91/147/148/205/285, 15/28/90/91/142/147/148/285/317/319, 15/37/91/148/285/319, 81/147/148/203/205, 147/148/285/319, 15/50/90/147/148, 15/66/81/90/285/319, 50/81/147/148/285, 37/147/148/285, 15/37/66/84/90/91/203/285/317, 15/84/90/91/203/285, 37/90/91/147, 90/91/205/317/319, 50/148/203/317, 15/28/50/66/81/84/90/285/317, 15/81/147, or 15/285, wherein the amino acid positions are relative to the reference sequence corresponding to residues 13 to 468 of SEQ ID NO: 360, or relative to the reference sequence corresponding to SEQ ID NO: 360.

37. (canceled)

38. (canceled)

39. The engineered RNase inhibitor of claim 20, wherein the amino acid sequence of the engineered RNase inhibitor comprises at least a substitution or substitution set at amino acid position(s) 78/260,396, 345, 37, 342, 395, 367, 38, 107, 228, 260, 57, 50/51, 338, 285/291/385, 175, 60, 145/147/148, 177, 28, 118, 64, 37/60/142/176/228/291/317, 60/64/317/319/342, 66/228/319/342/395, 37/142/291/317, 64/107/142/291/319/342/395, 37/60/317/319/342/395, 37/60/107/142/176/317/319/342, 142/317/319/342/395, 176/228/319/395, 228/291/342/395, 64/395, 64/107/142/176/228/319/342/395, 60/64/107/142/291/319/342, 37/66/107/291/317, 37/66/107/317/395, 37/228/317/395, 342/395, 66/142/319/342/395, 66/142/228/395, 363, 142/395, 60/64/177/291/395, 66/319, 64/107/177/228/291/317/395, 64/142/177/228/317, 60/228/317/395, 60/64/176/317/342, 177/228/342/395, 64/142/177/317/319, 60/64/107/342, 60/107/142/291/317/342/395, 66/228/319, 64/228/317/319, 168, 319/395, 37/107/228, 66/142, 37/342, 60/64/176/228/395, 60/64/342, 35, 60/66/395, 319, 291/317/319/342/395, 37/177,107, 37/60/64/142/291, 37/60/142/228/291, 60/319/342, 66/176/317/319/395, or 37/177/228, wherein the amino acid positions are relative to the reference sequence corresponding to residues 13 to 468 of SEQ ID NO: 442, or relative to the reference sequence corresponding to SEQ ID NO: 442.

40. (canceled)

41. (canceled)

42. The engineered RNase inhibitor of claim 20, wherein the amino acid sequence of the engineered RNase inhibitor comprises at least a substitution set at amino acid positions 28/118/175/260/338/367, 118/168/260/396, 38/60/168/260/338/367, 28/38/57/60/260/363/367, 57/118/260/338/367, 57/118/168/177/260/338/367, 260/396, 28/118/168/260/367/396, 28/260/338, 28/60/168/260, 57/60/118/175/177/260/338, 28/57/260/338/367, 35/260/338/367, 118/175/260/338, 168/260, 57/60/168/177/260/338/367, 28/168/260/338, 260/367, 28/57/137/260, 38/60/175/260/338, 38/60/260/367/396, 57/60/260/363/367, 60/260/367, 28/38/60/260/367, 60/168,260/363/367, 177/260/363/367, 38/260, 28/60/118/177/260, 28/35/60/118/175/260, 60/367, 28/60/118, 57/118,118/260/338/396, 28/38/57/60/118/177/260/338/363/367/396, 28/38/60/260/363/367, 28/35/38/57/118/260/363/367, 28/57/60/168/260/367, 168/175/260/338/367, 57/60/168/260/338/363/367/396, 60/168/363/367/396, 28/38/57/60/118/168/260/367, 28/175/260/367, 60/363/367/396, 260/338/367, 28/57/260/338/363/367, 168/260/367, 367/396, 28/35/175/260/367/396, or 57/60/168/260/367, wherein the amino acid positions are relative to the reference sequence corresponding to residues 13 to 468 of SEQ ID NO: 578, or relative to the reference sequence corresponding to SEQ ID NO: 578.

43-46. (canceled)

47. The engineered RNase inhibitor of claim 1, wherein the RNase inhibitor comprises an amino acid sequence comprising residues 13 to 468 of an even numbered SEQ ID NO. of SEQ ID NOs: 26-824, or an amino acid sequence comprising an even numbered SEQ ID NO. of SEQ ID NOs: 26-824.

48. (canceled)

49. The engineered RNase inhibitor of claim 1, wherein the engineered RNase inhibitor has RNase inhibitory activity and has at least one improved property as compared to a reference RNase inhibitor, wherein the improved property is selected from i) increased inhibitory activity against RNase A, ii) increased stability, iii) increased thermostability, iv) increased resistance to oxidation, and v) increased expression as soluble protein, or any combination of i), ii), iii), iv) and v), as compared to a reference RNase inhibitor, and wherein the reference RNase inhibitor has the sequence corresponding to residues 13 to 468 of SEQ ID NO: 2, 36, 238, 320, 360, 442, or 578, or the sequence corresponding to SEQ ID NO: 2, 36, 238, 320, 360, 442, or 578.

50-52. (canceled)

53. An RNase inhibitor comprising an amino acid sequence having at least 70%, 75%, 80%, 81%, 82%, 83%, 84%, 85%, 86%, 87%, 88%, 89%, 90%, 91%, 92%, 93%, 94%, 95%, 96%, 97%, 98%, 99%, or more sequence identity to
(a) the reference sequence corresponding to residues 12 to 467 of SEQ ID NO: 4; residues 12 to 467 of SEQ ID NO: 6; residues 12 to 472 of SEQ ID NO: 8; residues 12 to 467 of SEQ ID NO: 10;
residues 12 to 472 of SEQ ID NO: 12; residues 12 to 467 of SEQ ID NO: 14; residues 12 to 467 of SEQ ID NO: 16; residues 12 to 471 of SEQ ID NO: 18; residues 12 to 467 of SEQ ID NO: 20; residues 12 to 467 of SEQ ID NO: 22; or residues 12 to 467 of SEQ ID NO: 24; or
(b) the reference sequence corresponding to SEQ ID NO: 2, 4, 6, 8, 10, 12, 14, 16, 18, 20, 22, or 24.

54. The RNase inhibitor of claim 53, comprising (a) an amino acid sequence comprising
(a) residues 12 to 467 of SEQ ID NO: 4; residues 12 to 467 of SEQ ID NO: 6; residues 12 to 472 of SEQ ID NO: 8; residues 12 to 467 of SEQ ID NO: 10; residues 12 to 472 of SEQ ID NO: 12; residues 12 to 467 of SEQ ID NO: 14; residues 12 to 467 of SEQ ID NO: 16; residues 12 to 471 of SEQ ID NO: 18; residues 12 to 467 of SEQ ID NO: 20; residues 12 to 467 of SEQ ID NO: 22; or residues 12 to 467 of SEQ ID NO: 24; or
(b) an amino acid sequence comprising SEQ ID NO: 2, 4, 6, 8, 10, 12, 14, 16, 18, 20, 22, or 24.

55. The engineered RNase inhibitor of claim 1, wherein the engineered RNase inhibitor is purified.

56. A recombinant polynucleotide comprising a polynucleotide sequence encoding an engineered RNase inhibitor of claim 1.

57-61. (canceled)

62. An expression vector comprising at least one recombinant polynucleotide of claim 56.

63. (canceled)

64. (canceled)

65. A host cell comprising an expression vector of claim 62.

66. (canceled)

67. (canceled)

68. A method of producing an engineered RNase inhibitor polypeptide in a host cell comprising culturing a host cell of claim 65, under suitable culture conditions such that the encoded engineered RNase inhibitor is produced.

69. (canceled)

70. (canceled)

71. A composition comprising an RNase inhibitor of claim 1.

72-74. (canceled)

75. A method of inhibiting an RNase, comprising contacting an RNase with an engineered RNase inhibitor of claim 1 under conditions suitable for inhibiting the RNase.

76. (canceled)

77. (canceled)

78. A method for preparing a sample containing RNA, comprising contacting a sample with an RNase inhibitor of claim 1.

79. (canceled)

80. (canceled)

81. A kit comprising at least an RNase inhibitor of claim 1.

82. (canceled)
